(19) United States
(12) Patent Application Publication
(10) Pub. No.: US 2025/0163410 A1
(43) Pub. Date: May 22, 2025

(54) CRISPR-TRANSPOSON SYSTEMS FOR DNA MODIFICATION

(71) Applicant: The Trustees of Columbia University in the City of New York, New York, NY (US)

(72) Inventors: Samuel Henry Sternberg, New York, NY (US); Sanne Eveline Klompe, New York, NY (US); Matthew Walker, New York, NY (US); Dennis James Zhang, New York, NY (US); George Davis Lampe, New York, NY (US)

(21) Appl. No.: 18/875,026

(22) PCT Filed: Jun. 13, 2023
(86) PCT No.: PCT/US23/68361

§ 371 Date: Dec. 13, 2024

Related U.S. Application Data
(60) Provisional application No. 63/351,753, filed on Jun. 13, 2022.
(60) Provisional application No. 63/380,330, filed on Oct. 20, 2022.
(60) Provisional application No. 63/479,481, filed on Jan. 11, 2023.

(51) Int. Cl. C12N 15/11; C12N 9/22; C12N 15/90

(52) U.S. Cl. CPC C12N 15/11; C12N 9/22; C12N 15/902; C12N 2310/20; C12N 2800/80

(57) ABSTRACT

This disclosure to the methods for nucleic acid modification, gene targeting, and gene tagging comprising an engineered Clustered Regularly Interspaced Short Palindromic Repeats (CRISPR)-associated transposon (CAST) system with a donor DNA comprising at least one engineered transposon end sequence and/or at least one integration co-factor protein. More particularly, the present disclosure provides systems comprising: an engineered CAST system or one or more nucleic acids encoding the engineered CAST system, wherein the CAST system comprises at least one or all of: i) at least one Cas protein, ii) one or more transposon-associated proteins, iii) at least one guide RNA (gRNA) complementary to at least a portion of a target nucleic acid sequence; and a donor nucleic acid comprising a cargo nucleic acid sequence flanked by at least one engineered transposon end sequence and/or at least one integration co-factor protein, or a nucleic acid encoding thereof.

### CROSS-REFERENCE TO RELATED APPLICATIONS

[0001] This application claims the benefit of U.S. Provisional Application Nos. 63/351,753, filed Jun. 13, 2022, 63/380,330, filed Oct. 20, 2022, and 63/479,481, filed Jan. 11, 2023, the contents of which are herein incorporated by reference in their entirety.

### STATEMENT REGARDING FEDERALLY SPONSORED RESEARCH OR DEVELOPMENT

[0002] This invention was made with government support under grant number HG011650 and AI168976 awarded by the National Institutes of Health. The government has certain rights in the invention.

### FIELD

[0003] The present invention relates to methods and systems for DNA modification, gene targeting, and gene tagging comprising an engineered Clustered Regularly Interspaced Short Palindromic Repeats (CRISPR)-associated transposon (CAST) system having a donor DNA comprising at least one engineered transposon end sequence and/or at least one integration co-factor protein.

### SEQUENCE LISTING STATEMENT

[0004] The contents of the electronic sequence listing titled COLUM_40991_601.xml (Size: 6,329,222 bytes; and Date of Creation: Jun. 13, 2023) is herein incorporated by reference in its entirety.

### BACKGROUND

[0005] CRISPR-Cas systems can be used for programmable DNA integration, in which the nuclease-deficient CRISPR-Cas machinery (either Cascade from Type I systems, or Cas12 from Type V systems) coordinates with Tn7 transposon-associated proteins to mediate RNA-guided DNA targeting and DNA integration, respectively. This activity may be leveraged in bacterial or eukaryotic cells for the targeted integration of user-defined genetic payloads at user-defined genomic loci, via a mechanism that obviates requirements for DNA double-strand breaks (DSBs) necessary for homology-directed repair.

### SUMMARY

[0006] Provided herein are systems for RNA-guided nucleic acid modification. The systems comprise a) an engineered Clustered Regularly Interspaced Short Palindromic Repeats (CRISPR)-associated transposon (CAST) system or one or more nucleic acids encoding the engineered CAST system, wherein the CAST system comprises at least one or all of: i) at least one Cas protein; ii) at least one transposon-associated protein; and iii) at least one guide RNA (gRNA) complementary to at least a portion of a target nucleic acid sequence; and b) a donor nucleic acid comprising a cargo nucleic acid sequence flanked by at least one or both of: an engineered transposon right end sequence or an engineered transposon left end sequence; and/or c) at least one integration co-factor protein, or a nucleic acid encoding thereof.

[0007] In some embodiments, the engineered transposon right end sequence and/or the engineered left end sequence encodes an amino acid linker sequence. In some embodiments, the engineered transposon right end sequence and/or the engineered left end sequence is fully or partially AT rich. In some embodiments, the engineered transposon right end sequence and/or the engineered left end sequence comprises a 5 to 8 bp terminal end sequence.

[0008] In some embodiments, the engineered transposon right end sequence and/or the engineered left end sequence comprises at least two TnsB binding sites (TBSs). In some embodiments, each TBS comprises a sequence individually selected from: SEQ ID NO: 11, or SEQ ID NO: 12, wherein each M is individually A or C; each W is independently A or T; each R is independently A or G; each D is independently A, G or T; each Y is independently T or C; each K is G or T; B is G, T, or C; and each H is independently A, C or T.

[0009] In some embodiments, the engineered transposon right end sequence is at least about 75 basepairs (bp). In some embodiments, the engineered transposon right end sequence comprises a sequence of: SEQ ID NO: 1, or a variant sequence having one or more additions, substitutions or deletions thereof; any of SEQ ID NOs: 2-8; any of SEQ ID NOs: 18-844; SEQ ID NOs: 9, or a variant sequence having one or more additions, substitutions or deletions thereof; any of SEQ ID NOs: 845-2690; any of SEQ ID NOs: 2691-2702; or any of SEQ ID NOs: 2703-3119.

[0010] In some embodiments, the engineered transposon left end sequence is at least about 115 basepairs (bp). In some embodiments, the engineered transposon left end sequence further comprises an Integration Host Factor (IHF) binding site (IBS), wherein the IBS comprises a sequence of WATCARNNNNTTR, wherein W is A or T, R is A or G, and N is any nucleotide. In some embodiments, the engineered transposon left end sequence comprises a sequence of: SEQ ID NO: 10, or a variant sequence having one or more substitutions thereof; any of SEQ ID NOs: 3120-4665; any of SEQ ID NOs: 4666-4673; or any of SEQ ID NOs: 4674-5135.

[0011] In some embodiments, the cargo nucleic acid sequence encodes a peptide tag or a polypeptide.

[0012] In some embodiments, the at least one integration co-factor protein comprises Integration Host Factor (IHF), Factor for Inversion Stimulation (Fis), or a combination thereof.

[0013] In some embodiments, the engineered transposon right end sequence and/or the engineered transposon left end sequence is derived from Vibrio cholerae Tn6677 or Pseudoalteromonas Tn7016.

[0014] Provided herein are systems for RNA-guided nucleic acid modification. The systems comprise a) an engineered Clustered Regularly Interspaced Short Palindromic Repeats (CRISPR)-associated transposon (CAST) system or one or more nucleic acids encoding the engineered CAST system, wherein the CAST system comprises at least one or all of: i) at least one Cas protein; ii) at least one transposon-associated protein; iii) at least one guide RNA (gRNA) complementary to at least a portion of a target nucleic acid sequence; and b) a donor nucleic acid comprising a cargo nucleic acid sequence flanked by at least one engineered transposon end sequence; and/or c) at least one integration co-factor protein, or a nucleic acid encoding thereof. In some embodiments, the at least one engineered transposon end sequence encodes an amino acid linker sequence.

[0015] In some embodiments, the systems comprise a) an engineered Clustered Regularly Interspaced Short Palindromic Repeats (CRISPR)-associated transposon (CAST) system or one or more nucleic acids encoding the engineered CAST system, wherein the CAST system comprises at least one or all of: i) at least one Cas protein; ii) at least one transposon-associated protein; iii) at least one guide RNA (gRNA) complementary to at least a portion of a target nucleic acid sequence; and b) a donor nucleic acid comprising a cargo nucleic acid sequence flanked by at least one engineered transposon end sequence. In some embodiments, the at least one engineered transposon end sequence encodes an amino acid linker sequence.

[0016] In some embodiments, the systems comprise a) an engineered Clustered Regularly Interspaced Short Palindromic Repeats (CRISPR)-associated transposon (CAST) system or one or more nucleic acids encoding the engineered CAST system, wherein the CAST system comprises at least one or all of: i) at least one Cas protein; ii) at least one transposon-associated protein; iii) at least one guide RNA (gRNA) complementary to at least a portion of a target nucleic acid sequence; and b) at least one integration co-factor protein, or a nucleic acid encoding thereof.

[0017] In some embodiments, the systems comprise a) an engineered Clustered Regularly Interspaced Short Palindromic Repeats (CRISPR)-associated transposon (CAST) system or one or more nucleic acids encoding the engineered CAST system, wherein the CAST system comprises at least one or all of: i) at least one Cas protein; ii) at least one transposon-associated protein; iii) at least one guide RNA (gRNA) complementary to at least a portion of a target nucleic acid sequence; b) a donor nucleic acid comprising a cargo nucleic acid sequence flanked by at least one engineered transposon end sequence; and c) at least one integration co-factor protein, or a nucleic acid encoding thereof. In some embodiments, the at least one engineered transposon end sequence encodes an amino acid linker sequence.

[0018] In some embodiments, the donor nucleic acid comprises a cargo nucleic acid sequence flanked by one native transposon end sequence and one engineered transposon end sequence.

[0019] In some embodiments, the at least one engineered transposon end sequence is fully or partially AT-rich.

[0020] In some embodiments, the at least one engineered transposon end sequence comprises at least two TnsB binding sites (TBSs). In some embodiments, each TBS comprises a sequence individually selected from: CAMCCATAWRDTGATAWYKH (SEQ ID NO: 11), or CMMCBRWAWNNTGAHWWYWN (SEQ ID NO: 12), wherein each M is individually A or C; each W is independently A or T; each R is independently A or G; each D is independently A, G or T; each Y is independently T or C; each K is G or T; B is G, T, or C; and each H is independently A, C or T.

[0021] In some embodiments, the at least one engineered transposon end sequence comprises a 5 to 8 bp terminal end sequence. In some embodiments, the terminal end sequence comprises a terminal TG dinucleotide. In some embodiments, the terminal end sequence is immediately adjacent to the distal end of the transposase binding site farthest from the cargo nucleic acid sequence. In some embodiments, the terminal end sequence is separated from the distal end of the transposase binding site farthest from the cargo nucleic acid sequence by 1 to 3 basepairs (bp).

[0022] In some embodiments, the at least one engineered transposon end sequence is a transposon right end sequence 3′ to the cargo nucleic acid sequence, relative to transcription direction. In some embodiments, the at least one engineered transposon end sequence is a transposon left end sequence 5′ to the cargo nucleic acid sequence, relative to transcription direction. In some embodiments, the donor nucleic acid comprises a cargo nucleic acid sequence flanked by two engineered transposon sequences: an engineered transposon right end sequence and an engineered transposon left end sequence.

[0023] In some embodiments, the engineered transposon right end sequence and/or the engineered transposon left end sequence is derived from a Vibrio cholerae Tn6677 native transposon end sequence. In some embodiments, the engineered transposon right end sequence and/or the engineered transposon left end sequence is derived from a Pseudoalteromonas Tn7016 native transposon end sequence.

[0024] In some embodiments, the engineered transposon right end sequence is at least about 50 basepairs (bp). In some embodiments, the engineered transposon right end sequence is at least about 75 basepairs (bp).

[0025] In some embodiments, the engineered transposon right end sequence comprises two TBSs.

[0026] In some embodiments, the engineered transposon right end sequence comprises a sequence of: TGTTGATACAACCATAAAATGATAATTACACCCATAAATTGATAATTATCACACCCA (SEQ ID NO: 1), or a variant sequence having one or more additions, deletions, or substitutions thereof.

[0027] In some embodiments, the engineered transposon right end sequence comprises a sequence of:

(SEQ ID NO: 2)
TGTgGATACAACCATAAAATGATAATTACACCCATAAATgGATcA
TTATCACcCCCA;
(SEQ ID NO: 3)
TGTgGATACAACCATAAAAcGATAATTACACCCATAAATgGATcA
TTATCACACCCA;
(SEQ ID NO: 4)
TGTgGATcCAACCATAAAATGATAATTACACCCATAAATgGATcA
TTATCACACCCA;
(SEQ ID NO: 5)
TGTTGATACAACCATAAAAgGATtATTACACCCATtAATTGATAA
TTATCACACCCA;
(SEQ ID NO: 6)
TGTTGATACAACCATcAAATGgTAATTACACCCATAAATTGATAA
TTATCACACCCA;
(SEQ ID NO: 7)
TGTTGATACAACCATtAAATGATAATTcCACCCATAAtTTGATAA
TTATCACACCCA;
or
(SEQ ID NO: 8)
TGTTGATACAACCATtAAATGgTAATTcCACCCAaAtATTGATAA
TTATCACACCCA.

[0028] In some embodiments, the engineered transposon right end sequence comprises a sequence of SEQ ID NOs: 18-844.

[0029] In some embodiments, the engineered transposon right end sequence comprises a sequence of: TGTTGATACAACCATAAAATGATAATTACACCCATAAATTGATAATTATCACACCCATAAA TTGATATTGCCTCT (SEQ ID NO: 9), or a variant sequence having one or more additions, deletions, or substitutions thereof.

[0030] In some embodiments, the engineered transposon right end sequence comprises a sequence of SEQ ID NOs: 845-2690.

[0031] In some embodiments, the engineered transposon right end sequence is hyperactive. In some embodiments, the engineered transposon right end sequence comprises a sequence of SEQ ID NOs: 2691-2702. In some embodiments, the engineered transposon right end sequence comprises a sequence of SEQ ID NOs: 2703-3119.

[0032] In some embodiments, the engineered transposon left end sequence is at least about 105 basepairs (bp). In some embodiments, the engineered transposon left end sequence is at least about 115 bp.

[0033] In some embodiments, the engineered transposon left end sequence comprises three transposase TBSs.

[0034] In some embodiments, the engineered transposon left end sequence comprises an Integration Host Factor (IHF) binding site (IBS). In some embodiments, the IBS comprises a sequence of WATCARNNNNTTR, wherein W is A or T, R is A or G, and N is any nucleotide. In some embodiments, the engineered transposon left end sequence does not include an Integration Host Factor (IHF) binding site (IBS).

[0035] In some embodiments, the engineered transposon left end sequence comprises a sequence of: TGTTGATGCAACCATAAAGTGATATTTAATAATITATTTATAATCAGCA ACTTAACCACAAA ACAACCATATATTGATATCTCACAAAACAACCATAAGTTGATATITITGTGAAT (SEQ ID NO: 10), or a variant sequence having one or more additions, deletions, or substitutions thereof.

[0036] In some embodiments, the engineered transposon left end sequence comprises a sequence of SEQ ID NOs: 3120-4665.

[0037] In some embodiments, the engineered transposon left end sequence is hyperactive. In some embodiments, the engineered transposon left end sequence comprises a sequence of SEQ ID NOs: 4666-4673. In some embodiments, the engineered transposon left end sequence comprises a sequence of SEQ ID NOs: 4674-5135.

[0038] In some embodiments, the cargo nucleic acid sequence encodes a peptide tag. In some embodiments, the cargo nucleic acid sequence encodes a polypeptide. In some embodiments, the polypeptide comprises a fluorescent protein.

[0039] In some embodiments, the at least one integration co-factor protein comprises Integration Host Factor (IHF), Factor for Inversion Stimulation (Fis), or a combination thereof. In some embodiments, the at least one integration co-factor protein is provided as a fusion protein with TnsA and TnsB, or a nucleic acid encoding thereof. In some embodiments, the at least one integration co-factor protein fused to a localization agent. In some embodiments, the at least one integration co-factor protein comprises an amino acid sequence of any of SEQ ID NOs: 5136-5152.

[0040] In some embodiments, the at least one Cas protein is derived from a Type-I CRISPR-Cas system. In some embodiments, the engineered CAST system is a Type I-F system.

[0041] In some embodiments, the at least one Cas protein comprises Cas5, Cas6, Cas7, and Cas8. In some embodiments, the at least one Cas protein comprises a Cas8-Cas5 fusion protein.

[0042] In some embodiments, the at least one transposon protein is derived from a Tn7 or Tn7-like transposon system. In some embodiments, the at least one transposon-associated protein comprises TnsA, TnsB, TnsC, or a combination thereof. In some embodiments, the at least one transposon protein comprises a TnsA-TnsB fusion protein. In some embodiments, the at least one transposon-associated protein comprises TnsD and/or TniQ.

[0043] In some embodiments, the engineered transposon system is derived from Vibrio cholerae Tn6677. In some embodiments, the engineered transposon system is derived from Pseudoalteromonas Tn7006.

[0044] In some embodiments, the at least one gRNA is a non-naturally occurring gRNA. In some embodiments, the at least one gRNA is encoded in a CRISPR RNA (crRNA) array.

[0045] In some embodiments, the systems further comprise a target nucleic acid. In some embodiments, the target nucleic acid sequence comprises a TSD region having a 5′-CWG-3′ sequence motif.

[0046] In some embodiments, the one or more nucleic acids encoding the engineered CAST system comprises one or more messenger RNAs, one or more vectors, or a combination thereof. In some embodiments, the at least one Cas protein, the at least one transposon-associated protein, and the at least one gRNA are encoded by different nucleic acids. In some embodiments, the one or more of the at least one Cas protein, the at least one transposon-associated protein, and the at least one gRNA are encoded by a single nucleic acid.

[0047] In some embodiments, the nucleic acid encoding the at least one integration co-factor protein comprises at least one messenger RNA, at least one vector, or a combination thereof. In some embodiments, the at least one integration co-factor protein is encoded on a nucleic acid encoding one or more of: the at least one Cas protein, the at least one transposon-associated protein, and the at least one gRNA.

[0048] Also provided are compositions and cells comprising the disclosed system. In some embodiments, the cell is a prokaryotic cell. In some embodiments, the cell is a eukaryotic cell. In some embodiments, the cell is a mammalian cell. In some embodiments, the cell is a human cell.

[0049] Further provided are methods for nucleic acid integration comprising contacting a target nucleic acid sequence with a disclosed system or composition. In some embodiments, the target nucleic acid sequence comprises a TSD region having a 5′-CWG-3′ sequence motif.

[0050] In some embodiments, the target nucleic acid encodes a polypeptide gene product or is adjacent to a sequence encoding a polypeptide gene product.

[0051] In some embodiments, the target nucleic acid sequence is in a cell. In some embodiments, the contacting a target nucleic acid sequence comprises introducing the system into the cell. In some embodiments, the cell is a prokaryotic cell. In some embodiments, the cell is a eukaryotic cell. In some embodiments, the cell is a mammalian cell. In some embodiments, the cell is a human cell.

[0052] In some embodiments, the introducing the system into the cell comprises administering the system to a subject. In some embodiments, introducing the system into the cell comprises administering the system to a subject. In some embodiments, the administering comprises in vivo administration. In some embodiments, the administering comprises transplantation of ex vivo treated cells comprising the system.

[0053] Other aspects and embodiments of the disclosure will be apparent in light of the following detailed description.

### BRIEF DESCRIPTION OF THE DRAWINGS

[0054] FIGS. 1A-1E show the pooled library approach to investigate transposon end mutability. FIG. 1A is a schematic of RNA-guided transposition with VchCAST. FIG. 1B is a graph of integration efficiency of the WT mini-transposon in both orientations when directed to a genomic lacZ target site, as measured by qPCR. FIG. 1C is a table of the number of transposon right and left end library variants tested in each category. FIG. 1D is a schematic of an exemplary pooled library transposition approach. Library members were synthesized as single-stranded oligos and cloned into a plasmid donor library (pDonor), with 8-bp barcodes (gray) located between the transposon end and cargo used to uniquely identify each variant. The donor library was used for transposition into the E. coli genome, and junction amplicons were generated to determine the representation of each library member within integrated products by NGS. FIG. 1E is a schematic of the native VchCAST system from Vibrio cholerae (top), and relative T-RL integration activity for library members in which the left and right ends were sequentially mutagenized beginning internally (bottom). Each point represents the average activity from two transposition experiments using the same pooled donor library. Left end sequence is SEQ ID NO: 5229; right end sequence is SEQ ID NO: 5230.

[0055] FIGS. 2A-2E show transposase binding site (TBS) characterization for VchCAST. FIG. 2A is a schematic representation of the VchCAST transposon end sequences. Bioinformatically predicted transposase binding site (TBS) sequences are indicated with blue boxes and labeled L1-L3 and R1-R3. The 8-bp terminal end sequences that dictate the transposon boundaries are marked with yellow boxes. Left end sequence is SEQ ID NO: 5231; right end sequence is SEQ ID NO: 5230. FIG. 2B is a WebLogo depicting the sequence conservation of the six bioinformatically predicted TBSs. FIG. 2C is a graph of the relative integration efficiencies (log 2-transformed) for mutagenized TBS sequences averaged over all six binding sites, shown as the mean for two biological replicates. FIG. 2D, top is Tn7002 transposon end sequences colored based VchCAST transposon end library data, where red indicates a relatively inefficient residue (L1-SEQ ID NO: 5232; L2-SEQ ID NO: 5233; L3-SEQ ID NO: 5234; R1-SEQ ID NO: 5235; R2-SEQ ID NO: 5236; R3-SEQ ID NO: 5237). FIG. 2D, bottom is relative integration efficiencies of VchCAST/Tn7002 chimeric ends verify critical compatibility sequence requirements of TBSs. Data are shown for two biological replicates. FIG. 2E is a graph of relative integration efficiencies for transposon variants containing altered distances between the indicated TBSs. Orange arrows highlight the 10-bp periodic pattern of activity. Data are shown for two biological replicates.

[0056] FIGS. 3A-3D shows transposase sequence preferences influence on integration site patterns. FIG. 3A shows VchCAST exhibits target-specific heterogeneity in the distance (d) between the target site and integration site, which could result from sequence preferences within the downstream region (top). Deep sequencing revealed biases in integration site preference, with integration patterns shown for four target sites (4-7) located in the lac operon of the E. coli BL21(DE3) genome (top row) or encoded on a separate target plasmid (second row). Chimeric target plasmids that either maintain the 32-bp target site (third row) or 60-bp downstream region (bottom row) of target 4 were also tested. These data reveal that sequence identity of the downstream region (including the integration site), but not the target site, governs the observed in integration distance distribution. FIG. 3B is a schematic of integration site library experiment, in which integration was directed into an 8-bp degenerate sequence encoded on a target plasmid (pTarget). FIG. 3C is a sequence logo of preferred integration site, generated by selecting nucleotides from the top 5000 enriched sequences across all integration positions in each library, with a minimum threshold of four-fold enrichment in the integrated products compared to the input. FIG. 3D shows the preferred 5′-CWG-3′ motif in the center of the TSD is predictive of integration site distribution, as the displacement of this motif within the degenerate sequence shifts the preferred integration site distance, indicated by the red number.

[0057] FIGS. 4A-4E show that engineered transposon right ends enable functional in-frame protein tagging. FIG. 4A is an illustration of a minimal transposon right end sequence (“WT-min.” SEQ ID NO:1) and the amino acids it encodes in three different reading frames. The 8-bp terminal end (yellow box) and TBSs (blue boxes) are shown. ORF-1 (SEQ ID NOs: 5238 and 5239); ORF-2 (SEQ ID NOs: 5240 and 5241) and ORF-3 (SEQ ID NOs: 5242 and 5243). FIG. 4B is a graph of integration efficiencies for individual pDonor variants in which stop codons and codons encoding bulky/charged amino acids were replaced, as determined by qPCR. “Vector only” refers to the negative control condition where pEffector was co-transformed with a vector that did not encode a transposon. FIG. 4C shows select right end linker variants cloned in between the 10^{th} and 11th β-strands of GFP, in order to identify stable polypeptide linkers that still allow for proper formation and fluorescence activity of GFP. Normalized fluorescence intensity (NFI) was calculated using the optical density of each culture and is plotted for each linker variant alongside wildtype GFP. A schematic of a proof-of-concept experiment in which the endogenous E. coli gene msrB is tagged by targeted, site-specific RNA-guided transposition (FIG. 4D, top). Fluorescence microscopy images reveal functional tagging of MsrB with the linker variant right end, but not the WT, stop codon-containing right end (FIG. 4D, bottom). Scale bar represents 10 μm. FIG. 4E is western blots with anti-GFP antibody (top) and anti-GAPDH antibody (bottom) as loading control. The four samples are unmodified BL21(DE3) cells (‘-’), cells that underwent transposition with a GFP-encoding donor plasmid using either the WT transposon end (‘WT’) or the modified ORF2a transposon end (‘Variant’), and cells expressing a plasmid encoding GFP driven by a T7 promoter (‘pGFP’). The expected size of GFP alone is 26.8 kDa, while the expected size of the MsrB-GFP fusion product is ˜42 kDa.

[0058] FIGS. 5A-5G show IHF involvement in RNA-guided transposition by VchCAST. FIG. 5A shows library mutagenesis data for the transposon left end (SEQ ID NO: 5244). Each point represents the effect of 4-bp mutations, averaged across 4 variants per base. FIG. 5B shows integration activity of VchCAST in WT, ΔihfA, and ΔihfB cells. Integration activity was rescued by a plasmid encoding both ihfA and ihfB (pRescue). Each point represents integration efficiency measured by qPCR for one independent biological replicate. FIG. 5C shows integration activity when the IHF binding site (IBS) is mutated (Mut), in which all consensus bases within the IBS were modified (from 5′-AATCAGCAAACTTA-3′ (SEQ ID NO: 13) to 5′-CCGACTCAACGGC-3′(SEQ ID NO: 14)). FIG. 5D shows conservation of the IBS in the transposon left end of twenty Type I-F CAST systems, described in Klompe et al., 2022 (Mol Cell, 82, 616-628.e5). IBS sequences are SEQ ID NOs: 5245-5264, top to bottom. FIG. 5E shows a sequence logo generated by aligning the left end sequence of all homologs around the conserved IHF binding site. FIG. 5F shows integration activity in WT and ΔIHF cells for five highly active Type I-F CAST systems. Asterisks indicate the degree of statistical significance:* p≤0.05, ** p≤0.01, ***p≤0.001. FIG. 5G shows an exemplary model: IHF binds the left end to resolve the spacing between the first two TBSs, bringing together TnsB protomers to form an active transpososome.

[0059] FIGS. 6A-6E show sequencing and characterization of pDonor right end and left end pooled libraries. FIG. 6A is a histogram showing read counts for each of the input libraries, as defined by barcode sequences. All library members are represented in both the transposon left end and right end libraries. FIG. 6B is a histogram showing the percentage of each library member's high-quality reads in which the correct barcode is coupled to the correct transposon end sequence. Library members are identified by their barcodes. FIG. 6C is a histogram showing the highest percentage of each library member's uncoupled reads mapping to a single incorrect sequence. In other words, for a given library member, the incorrect (uncoupled) sequence with the highest read count was selected and expressed as the percent of total reads for that library member. These analyses demonstrate that only a small minority of all barcode reads for a given library member are associated with an incorrect (uncoupled) transposon end sequence. FIG. 6D shows all enrichment scores for library members in either integration orientation, for both the left end and right end libraries. Enrichment scores were calculated by dividing the abundance of each member in the output library by its abundance in the input library, and then taking the log 2 transformation of that value. Library member dropouts were arbitrarily assigned a score of −15, which fell below the minimum enrichment score across all samples, in order to be plotted on the same graphs. FIG. 6E shows the correlation between two independent biological replicates for the transposon left and right end library transposition experiments. For each graph, the upper R² value (black) includes enrichment scores for all transposon end variants, where dropouts were arbitrarily set to −15. The lower R² value (colored) includes only the enrichment scores for transposon end variants that were detected in both output libraries.

[0060] FIGS. 7A-7D show the sequence and spatial characterization of VchCAST TBSs. FIG. 7A shows sequence conservation among the six bioinformatically predicted TBS sequences, with nucleotides conserved among all six sites highlighted in gray. L1 is SEQ ID NO: 5265; L2 is SEQ ID NO: 5266; L3 is SEQ ID NO: 5267; R1 is SEQ ID NO: 5268; R2 is SEQ ID NO: 5269; R #is SEQ ID NO: 5270. FIG. 7B is integration activity for mutagenized TBS sequences at individual binding sites, shown as the mean of two biological replicates. Integration activity is represented as the library variant enrichment score normalized to WT. A schematic representation of the transposon end architecture is shown in FIG. 7C, top. Enrichment of individual transposon end variants for which the TBS were shuffled are shown as a heatmap (FIG. 7C, bottom left). The overall effect of each TBS is represented in a boxplot for the individual sites within both the left and right transposon ends, including their numerical mean (FIG. 7C, bottom right). A schematic representation of the spacing in between the TBS sequences of the transposon left and right ends is shown in FIG. 7D, top left. Integration efficiencies, calculated from enrichments within the larger transposon end library dataset, are shown for alternative spacing between the TBS sequences of the left and right end sequences.

[0061] FIGS. 8A-8E show transposase sequence preferences at the site of DNA integration. FIG. 8A is a schematic of target A integration products, with corresponding sequence logos of enriched sequences at each integration position. Sequence logos were generated by selecting all sequences with 4-fold enrichment in the integrated products compared to the input libraries. The y-axis of each sequence logo was set to a maximum of 1 bit. FIG. 8B shows integration site distance distribution for degenerate sequences containing multiple preferred CWG motifs, with preferred distances indicated in red. FIG. 8C shows integration site distance distributions of previously tested genomic target sites, as determined through deep sequencing. The TSD sequence+/−3-bp is shown for distances of 48, 49, and 50 bp. Integration occurs primarily 49-bp downstream of the target site but can be biased to occur 48- and/or 50-bp downstream due to sequence preferences at the site of integration. The TSD is bold, and favored (green) or disfavored (orange and red) nucleotides according to the preference sequence logo are indicated. SEQ ID NOs: 5282-5284 in the upper left panel; SEQ ID NOs: 5285-5287 in the upper middle panel: SEQ ID NOs: 5288-5290 in the upper right panel: SEQ ID NOs: 5291-5293 in the lower left panel; SEQ ID NOs: 5294-5296 in the lower middle panel; SEQ ID NOs: 5297-5299 in the lower right panel. FIG. 8D shows integration site distance distribution for two targets, A and B, with preferred distances indicated in red. FIG. 8E shows nucleotide preferences surrounding the degenerate sequence may be responsible for differences in the overall integration site distance distribution.

[0062] FIGS. 9A-9F show the effect of target-transposon boundary sequences and internal sequences on DNA integration. A schematic representation of DNA cleavage by TnsA and TnsB, leading to full excision of the transposon from the donor site is shown in FIG. 9A, top. Different transposon-flanking sequences were tested on both the left and right transposon boundaries, and integration efficiencies were determined by calculating the enrichment of each library member from within the larger transposon end pool (FIG. 9A, bottom). An illustration of the imperfect 8-bp terminal end sequences for VchCAST is shown in FIG. 9B, top. Calculated integration efficiencies are plotted for transposon end variants in which either the left or right terminal end sequence was mutated (FIG. 9B, bottom). An illustration of the transposon end sequences including the target site duplication (TSD), 8-bp terminal end, and first transposase binding site (TBS1) is shown in FIG. 9C, top. The specific sequence shown (SEQ ID NO: 5302) is derived from the VchCAST left end. Integration efficiencies relative to WT are shown for transposon end variants in which the distance between the 8-bp terminal end and TBS1 was altered for either the transposon left or right end (FIG. 9C, middle). Analysis of deep sequencing data revealed TnsB cleavage sites for the right end and left end variants that were functional for transposition; cleavage sites are indicated with red arrows (FIG. 9C, bottom). TBS1 sequence is SEQ ID NO: 5304. Right end sequences are SEQ ID NOs: 5303, 5305 and 5306 for WT, +1 and +3, respectively. Left end sequences are SEQ ID NOs: 5307-5311 for −3, −2, WT, +1 and +3, respectively. FIG. 9D is an illustration of WT and modified transposon right end sequences. The 8-bp terminal end (yellow boxes), transposase binding sites (blue boxes), and palindromic sequences (blue and pink lines), are indicated. The native sequence (SEQ ID NO: 5312) encompasses 130 bp from V. cholerae Tn6677, whereas only 75 bp were used in the “WT” sequence (SEQ ID NO: 5313) used in library experiments. FIG. 9E is a graph of the integration activity of right end library variants, in which the palindromic sequence was altered. Integration activity is represented as the library variant enrichment score normalized to WT. Each variant included a distinct combination of palindromic sequences P_{B} and P_{A}, with the ordering as shown. Blue text (“native”) indicates the native palindromic sequence. Orange text (“G-T”) refers to variants in which palindrome nucleotides were mutated from G to T and A to C. Green text (“G-C”) refers to variants in which palindrome nucleotides were mutated from G to C and A to T. FIG. 9F is a graph of the integration efficiencies of right end variants in which different internal promoter sequences point inwards of the transposon (In) or outwards across the transposon end (Out). Promoter strengths are indicated pJ23114 (+), pJ23111 (++), pJ23119 (+++).

[0063] FIGS. 10A-10D show engineering of the VchCAST right end. FIG. 10A is integration data for transposon right end variants that were modified to encode functional protein linker sequences in each of three open reading frames (ORF1-3). Integration efficiencies were calculated based on enrichment values within the library dataset. A schematic representation of the linker functionality assay in which GFP includes a linker sequence encoded by a mutated right end is shown in FIG. 10B, top. The fluorescence of E. coli cells expressing each of the indicated GFP constructs was visualized upon excitation with blue light (FIG. 10B, bottom). FIG. 10C shows fluorescence microscopy images of negative control samples for the C-terminal GFP-tagging experiment, showing a brightfield image (left), fluorescence image (center), and composite merge (right). Controls included experiments testing a non-targeting pEffector alone (top) or in combination with either a transposon encoding a functional linker variant (middle) or a wildtype transposon (bottom). Scale bar represents 10 μm. FIG. 10D is a schematic of transposon right end linker variants. Shading indicates amino acids that differ from the WT ORF. WT-min is SEQ ID NO: 1. WT ORF-1 is SEQ ID NOs: 5238 and 5239; WT is ORF-2 SEQ ID NOs: 5240 and 5241 and WT ORF-3 is SEQ ID NOs: 5242 and 5243. Variant ORF1a DNA sequence is SEQ ID NO: 2 and amino acid sequence is SEQ ID NO: 5354. Variant ORF1b DNA sequence is SEQ ID NO: 3 and amino acid sequence is SEQ ID NO: 5355. Variant ORF1v DNA sequence is SEQ ID NO: 4 and amino acid sequence is SEQ ID NO: 5356. Variant ORF2a DNA sequence is SEQ ID NO: 5 and amino acid sequence is SEQ ID NO: 5357. Variant ORF3a DNA sequence is SEQ ID NO: 6 and amino acid sequence is SEQ ID NO: 5358. Variant ORF3b DNA sequence is SEQ ID NO: 7 and amino acid sequence is SEQ ID NO: 5359. Variant ORF3c DNA sequence is SEQ ID NO: 8 and amino acid sequence is SEQ ID NO: 5360.

[0064] FIGS. 11A-11F show transposition efficiency of VchCAST and other Type I-F CAST systems in WT and NAP-knockout cells. FIG. 11A is the integration efficiency under different expression systems and induction conditions for VchCAST in WT and ΔihfA cells. pSPIN is a single plasmid that encodes both the donor molecule and transposition machinery, as described in Vo, et al (2021) Nat Biotechnol, 39, 480-489. pEffector+pDonor refers to separate plasmids that encode the transposition machinery and donor DNA, respectively. The indicated promoters were also tested, with J23119 and J23101 being constitutively active whereas the T7 promoter is induced by growing cells on IPTG. FIG. 1B is an alignment of the sequence between the first two TnsB binding sites (L1 and L2) in the left end, generated by Clustal Omega and colored in Jalview to highlight conserved residues. The consensus IHF binding site (IBS) is shown below the alignment. Sequences listed are from top to bottom SEQ ID NOs: 5314-5332, respectively, except for SEQ ID NO: 5321 for both Tn6677 and Tn7000. FIG. 11C shows integration orientation preference in WT and ΔihfA cells for VchCAST and Tn7000. For Tn7000, T-RL integration products were not detected (N.D.) after 35 cycles of qPCR, indicating an integration efficiency less than 0.01%. Integration orientation (FIG. 11D) and efficiency (FIG. 11E) of transposons with symmetric end sequences in WT and ΔihfA cells. R-L refers to a WT-like sequence in which the transposon end identity has not been changed, whereas R-R or L-L refer to transposons in which the left or right end sequence have been mutated to the opposite end sequence, resulting in a transposon with symmetric ends. FIG. 11F shows the effect of nucleoid associated protein knockouts for VchCAST. Transposition was measured by qPCR after expressing pSPIN in each of the indicated E. coli knockout strains.

[0065] FIGS. 12A-12C show the effect of NAP knockouts on Tn7 transposition efficiency and fidelity. FIG. 12A is a schematic of an NGS-based Tn7 transposition assay. The transposon cargo encodes genomic primer binding sites (“P1”) adjacent to the right and left ends, such that the NGS amplicon length (“C”) is the same for unintegrated products and for integrated products in both orientations. Using this strategy, a single NGS library reports both the integrated and unintegrated products, while avoiding PCR bias that might arise from amplifying products of different lengths or primer binding sites. FIG. 12B shows the Tn7 integration efficiencies in the indicated NAP knockout strains are shown, quantified using both qPCR and NGS. The dotted line shows the WT integration value as measured by NGS. ΔihfA or ΔihfB have no effect on integration activity, whereas Δfis increases integration activity ˜4-fold. FIG. 12C shows the integration distance and orientation distribution downstream of the glmS locus for Tn7 in WT and Δfis cells. The x-axis refers to the distance in bp between the stop codon of glmS and the integration site. For WT and knockout cells, the dominant distance is the canonical 25 bp downstream of glmS. The y-axes are shown as linear scale (top) and as log 10 scale (bottom), in order to highlight low frequency integration events at non-canonical distances and orientations.

[0066] FIG. 13, similar to FIG. 4A, shows the sequence of the native transposon right end derived from Vibrio cholerae Tn6677 (SEQ ID NO: 5333) and the amino acids it encodes Frame 1 (SEQ ID NOs: 5238 and 5239); Frame 2 (SEQ ID NOs: 5240 and 5241); Frame 3 (SEQ ID NOs: 5242 and 5243); Frame 4 (SEQ ID NO: 5334); Frame 5 (SEQ ID NO: 5335); and Frame 6 (SEQ ID NO: 5336-5337). Shown in the middle is the DNA sequence of the transposon right end, orientated such that the end of the transposon, including the 8-bp terminal repeat colored in yellow, is at the far left, whereby the genomic flanking sequence would be to the left of the right end, and the internal cargo encoded within the mini-transposon would be to the right of the right end sequence shown. TnsB binding sites are colored in light blue. Were this sequence to be transcribed and translated into protein, it would yield the six potential coding sequences shown about and below the DNA sequence, according to the direction of translation and the specific open reading frame (ORF) selected during the integration event.

[0067] FIGS. 14A and 14B are schematics of the advantages of CAST-based protein tagging. Multi-spacer CRISPR arrays allow multiplexing, meaning CASTs can be harnessed for tagging multiple target genes in parallel through a single plasmid construct (FIG. 14A). The ability of CASTs to efficiently integrate large cargos (e.g., ˜10 kb) suggests lengthier tags and, for example, low tandem FP arrays are well-suited for CAST-based insertion, enabling signaling amplification (FIG. 14B).

[0068] FIG. 15 shows the result of the mutational panel revealing high sequence plasticity for certain positions within the TnsB binding sites and critical sequence constraints in others. These data support a consensus sequence of: CMMCBRWAWNNTGAHWWYWN (SEQ ID NO: 12).

[0069] FIG. 16 shows the preferential transposase binding site spacing. Manipulating the spacing between the first and the distal two TnsB binding sites on the right or left transposon end revealed a ˜10-bp periodic preference for integration. The distance of this preference corresponds to a single turn of the DNA double helix, which suggests that TnsB protomers are able to form an active paired-end complex if they are positioned on a consistent side of donor DNA.

[0070] FIG. 17 is a graph showing that mutating the putative IBS decreases integration efficiency in WT but not ihfA knockout cells. The first mutant, “AT< >CG” (SEQ ID NO: 5339), has all adenines and thymines substituted with cytosines and guanines, respectively, which disrupts all non-N bases in the E. coli IBS consensus (5′-WATCARNNNNTTR). The second mutant (SEQ ID NO: 5340) has the IBS inverted to the reverse complement, which would cause IHF to bind on the reverse strand in the opposite direction. WT sequence is SEQ ID NO: 5338.

[0071] FIG. 18 shows a proposed model of IHF binding to the transposon end and bending the left transposon end between two TnsB binding sites, facilitating formation of the strand transfer complex.

[0072] FIG. 19A is a schematic of exemplary TnsA-IHF-B fusion constructs. The single chain IHF sequence was encoded internally between TnsA-NLS and TnsB. Different linkers were screened between scIHF and the surrounding subunits to ensure proper flexibility and spatial requirements were met to maintain functional TnsA and TnsB subunits. FIG. 19B is a graph of E. coli transposition assays to measure the efficiency of various TnsA-IHF-TnsB variants. All variants showed robust transposition activity. ΔIHF represents a construct in which no IHF or linker sequences were present between TnsA-NLS and TnsB. GSGSGG is SEQ ID NO: 5341 and (GGS)₆ is SEQ ID NO: 5342.

[0073] FIG. 20 is a schematic of exemplary transposon end sequences (SEQ ID NOs: 3120-4665 for left end transposon sequences and SEQ ID NOs: 845-2690 for right end transposon sequences). Transposon end library sequences were designed to include the minimally necessary transposon end sequence—115-bp for the Tn6677 transposon left end (SEQ ID NO: 5345), and 75-bp for the Tn6677 transposon right end (SEQ ID NO: 5346)—together with a ‘stuffer’ sequence that was designed in order to facilitate oligoarray synthesis of the library members with a constant oligonucleotide length across all library members and added protein binding sites or modified AT content. Additionally, ‘stuffer’ sequences enabled consistency when designing transposon end variants in which the spacing between TnsB binding sites was increased by N nucleotides, which necessitated eliminating a corresponding number of N nucleotides from the ‘stuffer’ sequence to maintain a constant total length of transposon end variant. The starting point ‘stuffer’ sequence used for transposon left end variants was 32-bp in length, and contained the sequence 5′-CGAGTATTTCAGCAAAACTACTGCAGTAAGAA-3′ (SEQ ID NO: 5343). The starting point ‘stuffer’ sequence used for transposon right end variants was 47-bp in length, and contained the sequence 5′-GATCATAGTCAGACCAACATTGCTACGACCCGTATTCGCACCGACAC-3′ (SEQ ID NO: 5344).

[0074] FIGS. 21A-21C show identification of hyperactive transposon end variants. A hypoactive background was established in order to facilitate identification of modified transposon end sequences that increase activity relative to the WT, native transposon end sequence. To reduce overall integration activity, cells were plated on solid LB-agar media lacking any inducer (IPTG). When compared to plating cells on ˜0.1 mM IPTG (+ column), the integration efficiency without IPTG (− column) decreased approximately 3-fold, from ˜80% to ˜25% (FIG. 21A). Transposon library experiments were performed within this hypoactive background to identify hyperactive transposon end variants that were improved relative to WT (FIG. 21B). The four barcoded WT transposon end library members are indicated by dashed horizontal lines, and the left and right graphs show transposon right end and left end variants, respectively, as described at the top of the graph. Each transposon end variant is identified with a description of the sequence, or with an identifier; in both cases, the sequences of the modified transposon ends can be found in Table 5 (SEQ ID NOs: 291-2702) or Table 6 (SEQ ID NOs:4666-4673). “rc” denotes the reverse complement of a binding site sequence. Integration data are reported as a fold-change, normalized to WT, based on the number of sequencing reads in the integration product library divided by the starting abundance in the input library, relative to the four barcoded WT library members. FIG. 21C shows the validation of hyperactive variants by cloning select right end variants into a pDonor substrate and measuring integration efficiency via qPCR. Sequences of the variant transposon ends are illustrated, along with their corresponding integration efficiencies. A WT pDonor substrate with native transposon left and right ends is shown for comparison. WT is SEQ ID NO: 5347; IHF is SEQ ID NO: 5348; IHF(rc) is SEQ ID NO: 5349; H-NC is SEQ ID NO: 5350; and H-NS(rc) is SEQ ID NO: 5351.

### DETAILED DESCRIPTION

[0075] The disclosed systems, kits, and methods provide systems and methods for nucleic acid integration utilizing engineered CRISPR-associated transposon systems. The disclosed systems, kits, and methods provide systems and methods for RNA-guided DNA integration utilizing engineered CRISPR-associated transposon systems.

[0076] What distinguishes mobile DNA from other non-mobile DNA are the transposon end sequences. These transposon ends contain repetitive sequence elements to which the transposase binds, thereby identifying the mobilized genetic payload. Although CRISPR-associated transposons hold great potential for many different types of genome engineering purposes, the integration events are not scarless, as the desired payload must be flanked by the transposon end sequences recognized by the transposases, thus leaving scars behind at these regions within the integrated site in the genome. Because the transposon ends are essential for DNA mobilization, the scars cannot be outright eliminated, however their sequences can be modified through both rational engineering or directed evolution.

[0077] Herein, pooled library screening and high-throughput sequencing reveal sequence preferences during transposition by the Type I-F Vibrio cholerae CAST system. On the donor DNA, large mutagenic libraries identified core binding sites recognized by the TnsB transposase, as well as an additional conserved region that encoded a consensus binding site for integration host factor (IHF). Remarkably, VchCAST utilized IHF for efficient transposition, thus revealing a cellular factor involved in CRISPR-associated transpososome assembly. In fact, two host factors can aid in RNA-guided DNA integration. The first factor is IHF, which in Escherichia coli is encoded by two genes, ihfA and ihfB. The second factor is factor for inversion stimulation (Fis), encoded by one gene, fis. Loss of either component decreased integration activity. On the target DNA, preferred sequence motifs were uncovered at the integration site that explained previously observed heterogeneity with single-base pair resolution. Finally, the library data was utilized to design modified transposon variants to enable in-frame protein tagging.

[0078] Section headings as used in this section and the entire disclosure herein are merely for organizational purposes and are not intended to be limiting.

### Definitions

[0079] The terms “comprise(s),” “include(s),” “having,” “has,” “can,” “contain(s),” and variants thereof, as used herein, are intended to be open-ended transitional phrases, terms, or words that do not preclude the possibility of additional acts or structures. As used herein, comprising a certain sequence or a certain SEQ ID NO usually implies that at least one copy of said sequence is present in recited peptide or polynucleotide. However, two or more copies are also contemplated. The singular forms “a,” “and” and “the” include plural references unless the context clearly dictates otherwise. The present disclosure also contemplates other embodiments “comprising,” “consisting of,” and “consisting essentially of,” the embodiments or elements presented herein, whether explicitly set forth or not.

[0080] For the recitation of numeric ranges herein, each intervening number there between with the same degree of precision is explicitly contemplated. For example, for the range of 6-9, the numbers 7 and 8 are contemplated in addition to 6 and 9, and for the range 6.0-7.0, the number 6.0, 6.1, 6.2, 6.3, 6.4, 6.5, 6.6, 6.7, 6.8, 6.9, and 7.0 are explicitly contemplated.

[0081] Unless otherwise defined herein, scientific, and technical terms used in connection with the present disclosure shall have the meanings that are commonly understood by those of ordinary skill in the art. For example, any nomenclature used in connection with, and techniques of cell and tissue culture, molecular biology, genetics and protein and nucleic acid chemistry and hybridization described herein are those that are well known and commonly used in the art. The meaning and scope of the terms should be clear; in the event, however of any latent ambiguity, definitions provided herein take precedent over any dictionary or extrinsic definition. Further, unless otherwise required by context, singular terms shall include pluralities and plural terms shall include the singular.

[0082] As used herein, “nucleic acid” or “nucleic acid sequence” refers to a polymer or oligomer of pyrimidine and/or purine bases, preferably cytosine, thymine, and uracil, and adenine and guanine, respectively (See Albert L. Lehninger, Principles of Biochemistry, at 793-800 (Worth Pub. 1982)). The present technology contemplates any deoxyribonucleotide, ribonucleotide, or peptide nucleic acid component, and any chemical variants thereof, such as methylated, hydroxymethylated, or glycosylated forms of these bases, and the like. The polymers or oligomers may be heterogenous or homogenous in composition and may be isolated from naturally occurring sources or may be artificially or synthetically produced. In addition, the nucleic acids may be DNA or RNA, or a mixture thereof, and may exist permanently or transitionally in single-stranded or double-stranded form, including homoduplex, heteroduplex, and hybrid states. In some embodiments, a nucleic acid or nucleic acid sequence comprises other kinds of nucleic acid structures such as, for instance, a DNA/RNA helix, peptide nucleic acid (PNA), morpholino nucleic acid (see. e.g., Braasch and Corey, Biochemistry. 41(14): 4503-4510 (2002)) and U.S. Pat. No. 5,034,506), locked nucleic acid (LNA; see Wahlestedt et al., Proc. Natl. Acad. Sci. U.S.A., 97: 5633-5638 (2000)), cyclohexenyl nucleic acids (see Wang, J. Am. Chem. Soc., 122: 8595-8602 (2000)), and/or a ribozyme. Hence, the term “nucleic acid” or “nucleic acid sequence” may also encompass a chain comprising non-natural nucleotides, modified nucleotides, and/or non-nucleotide building blocks that can exhibit the same function as natural nucleotides (e.g., “nucleotide analogs”); further, the term “nucleic acid sequence” as used herein refers to an oligonucleotide, nucleotide or polynucleotide, and fragments or portions thereof, and to DNA or RNA of genomic or synthetic origin, which may be single or double-stranded, and represent the sense or antisense strand. The terms “nucleic acid,” “polynucleotide,” “nucleotide sequence,” and “oligonucleotide” are used interchangeably. They refer to a polymeric form of nucleotides of any length, either deoxyribonucleotides or ribonucleotides, or analogs thereof.

[0083] Nucleic acid or amino acid sequence “identity,” as described herein, can be determined by comparing a nucleic acid or amino acid sequence of interest to a reference nucleic acid or amino acid sequence. The percent identity is the number of nucleotides or amino acid residues that are the same (e.g., that are identical) as between the sequence of interest and the reference sequence divided by the length of the longest sequence (e.g., the length of either the sequence of interest or the reference sequence, whichever is longer). A number of mathematical algorithms for obtaining the optimal alignment and calculating identity between two or more sequences are known and incorporated into a number of available software programs. Examples of such programs include CLUSTAL-W, T-Coffee, and ALIGN (for alignment of nucleic acid and amino acid sequences), BLAST programs (e.g., BLAST 2.1, BL2SEQ, and later versions thereof) and FASTA programs (e.g., FASTA3x, FAST™, and SSEARCH) (for sequence alignment and sequence similarity searches). Sequence alignment algorithms also are disclosed in, for example, Altschul et al., J. Molecular Biol., 215(3): 403-410 (1990), Beigert et al., Proc. Natl. Acad. Sci. USA, 106(10): 3770-3775 (2009), Durbin et al., eds., Biological Sequence Analysis: Probabilistic Models of Proteins and Nucleic Acids, Cambridge University Press, Cambridge, UK (2009), Soding, Bioinformatics, 21(7): 951-960 (2005), Altschul et al., Nucleic Acids Res., 25(17): 3389-3402 (1997), and Gusfield, Algorithms on Strings, Trees and Sequences, Cambridge University Press, Cambridge UK (1997)).

[0084] The term “homology” and “homologous” refers to a degree of identity. There may be partial homology or complete homology. A partially homologous sequence is one that is less than 100% identical to another sequence.

[0085] As used herein, the term “hybridization” is used in reference to the pairing of complementary nucleic acids. Hybridization and the strength of hybridization (e.g., the strength of the association between the nucleic acids) is influenced by such factors as the degree of complementary between the nucleic acids, stringency of the conditions involved, and the Tm of the formed hybrid. Hybridization methods involve the annealing of one nucleic acid to another, complementary nucleic acid, e.g., a nucleic acid having a complementary nucleotide sequence. The ability of two polymers of nucleic acid containing complementary sequences to find each other and “anneal” or “hybridize” through base pairing interaction is a well-recognized phenomenon. The initial observations of the “hybridization” process by Marmur and Lane, Proc. Nal. Acad. Sci. USA, 46: 453 (1960) and Doty et al., Proc. Nal. Acad. Sci. USA, 46: 461 (1960), have been followed by the refinement of this process into an essential tool of modem biology. For example, hybridization and washing conditions are now well known and exemplified in Sambrook et al., supra. The conditions of temperature and ionic strength determine the “stringency” of the hybridization.

[0086] As used herein, a “double-stranded nucleic acid” may be a portion of a nucleic acid, a region of a longer nucleic acid, or an entire nucleic acid. A “double-stranded nucleic acid” may be, e.g., without limitation, a double-stranded DNA, a double-stranded RNA, a double-stranded DNA/RNA hybrid, etc. A single-stranded nucleic acid having secondary structure (e.g., base-paired secondary structure) and/or higher order structure (e.g., a stem-loop structure) may also be considered a “double-stranded nucleic acid.” For example, triplex structures are considered to be “double-stranded.” In some embodiments, any base-paired nucleic acid is a “double-stranded nucleic acid.”

[0087] The term “gene” refers to a DNA sequence that comprises control and coding sequences necessary for the production of an RNA having a non-coding function (e.g., a ribosomal or transfer RNA), a polypeptide, or a precursor of any of the foregoing. The RNA or polypeptide can be encoded by a full length coding sequence or by any portion of the coding sequence so long as the desired activity or function is retained. Thus, a “gene” refers to a DNA or RNA, or portion thereof, that encodes a polypeptide or an RNA chain that has functional role to play in an organism. For the purpose of this disclosure, it may be considered that genes include regions that regulate the production of the gene product, whether or not such regulatory sequences are adjacent to coding and/or transcribed sequences. Accordingly, a gene includes, but is not necessarily limited to, promoter sequences, terminators, translational regulatory sequences such as ribosome binding sites and internal ribosome entry sites, enhancers, silencers, insulators, boundary elements, replication origins, matrix attachment sites, and locus control regions.

[0088] The terms “non-naturally occurring,” “engineered,” and “synthetic” are used interchangeably and indicate the involvement of the hand of man. The terms, when referring to nucleic acid molecules or polypeptides mean that the nucleic acid molecule or the polypeptide is at least substantially free from at least one other component with which they are naturally associated in nature and as found in nature.

[0089] A “vector” or “expression vector” is a replicon, such as plasmid, phage, virus, or cosmid, to which another DNA segment, e.g., an “insert,” may be attached or incorporated so as to bring about the replication of the attached segment in a cell.

[0090] A cell has been “genetically modified,” “transformed,” or “transfected” by exogenous DNA, e.g., a recombinant expression vector, when such DNA has been introduced inside the cell. The presence of the exogenous DNA results in permanent or transient genetic change. The transforming DNA may or may not be integrated (covalently linked) into the genome of the cell. For example, the transforming DNA may be maintained on an episomal element such as a plasmid. With respect to eukaryotic cells, a stably transformed cell is one in which the transforming DNA has become integrated into a chromosome so that it is inherited by daughter cells through chromosome replication. This stability is demonstrated by the ability of the eukaryotic cell to establish cell lines or clones that comprise a population of daughter cells containing the transforming DNA. A “clone” is a population of cells derived from a single cell or common ancestor by mitosis. A “cell line” is a clone of a primary cell that is capable of stable growth in vitro for many generations.

[0091] A “subject” or “patient” may be human or non-human and may include, for example, animal strains or species used as “model systems” for research purposes, such a mouse model as described herein. Likewise, patient may include either adults or juveniles (e.g., children). Moreover, patient may mean any living organism, preferably a mammal (e.g., human or non-human) that may benefit from the administration of compositions contemplated herein. Examples of mammals include, but are not limited to, any member of the Mammalian class: humans, non-human primates such as chimpanzees, and other apes and monkey species; farm animals such as cattle, horses, sheep, goats, swine; domestic animals such as rabbits, dogs, and cats; laboratory animals including rodents, such as rats, mice and guinea pigs, and the like. Examples of non-mammals include, but are not limited to, birds, fish, and the like. In one embodiment of the methods and compositions provided herein, the mammal is a human.

[0092] The term “contacting” as used herein refers to bring or put in contact, to be in or come into contact. The term “contact” as used herein refers to a state or condition of touching or of immediate or local proximity. Contacting a composition to a target destination, such as, but not limited to, an organ, tissue, cell, or tumor, may occur by any means of administration known to the skilled artisan.

[0093] As used herein, the terms “providing,” “administering,” and “introducing,” are used interchangeably herein and refer to the placement of the systems of the disclosure into a cell, organism, or subject by a method or route which results in at least partial localization of the system to a desired site. The systems can be administered by any appropriate route which results in delivery to a desired location in the cell, organism, or subject.

[0094] Preferred methods and materials are described below, although methods and materials similar or equivalent to those described herein can be used in practice or testing of the present disclosure. All publications, patent applications, patents and other references mentioned herein are incorporated by reference in their entirety. The materials, methods, and examples disclosed herein are illustrative only and not intended to be limiting.

### Systems

[0095] In bacteria and archaea, CRISPR/Cas systems provide immunity by incorporating fragments of invading phage, virus, and plasmid DNA into CRISPR loci and using corresponding CRISPR RNAs (“crRNAs”) to guide the degradation of homologous sequences. Transcription of a CRISPR locus produces a “pre-crRNA,” which is processed to yield crRNAs containing spacer-repeat fragments that guide effector nuclease complexes to cleave dsDNA sequences complementary to the spacer. Several different types of CRISPR systems are known, (e.g., type I, type II, or type III), and classified based on the Cas protein type and the use of a proto-spacer-adjacent motif (PAM) for selection of proto-spacers in invading DNA.

[0096] Although RNA-guided targeting typically leads to endonucleolytic cleavage of the bound substrate, recent studies have uncovered a range of noncanonical pathways in which CRISPR protein-RNA effector complexes have been naturally repurposed for alternative functions. For example, some Type I (Cascade) and Type II (Cas9) systems leverage truncated guide RNAs to achieve potent transcriptional repression without cleavage and other Type I (Cascade) and Type V (Cas12) systems lie inside unusual bacterial Tn7-like transposons and lack nuclease components altogether.

[0097] Disclosed herein are systems or kits for nucleic acid modification comprising: a) an engineered Clustered Regularly Interspaced Short Palindromic Repeats (CRISPR)-associated transposon (CAST) system or one or more nucleic acids encoding the engineered CAST system, wherein the CAST system comprises at least one or all of: i) at least one Cas protein; ii) at least one transposon-associated protein; iii) at least one guide RNA (gRNA) complementary to at least a portion of a target nucleic acid sequence; and b) a donor nucleic acid comprising a cargo nucleic acid sequence flanked by at least one engineered transposon end sequence; and/or c) at least one integration co-factor protein, or a nucleic acid encoding thereof.

[0098] In some embodiments, the systems comprise a) an engineered Clustered Regularly Interspaced Short Palindromic Repeats (CRISPR)-associated transposon (CAST) system or one or more nucleic acids encoding the engineered CAST system, wherein the CAST system comprises at least one or all of: i) at least one Cas protein; ii) at least one transposon-associated protein; iii) at least one guide RNA (gRNA) complementary to at least a portion of a target nucleic acid sequence; and b) a donor nucleic acid comprising a cargo nucleic acid sequence flanked by at least one engineered transposon end sequence.

[0099] In some embodiments, the systems comprise a) an engineered Clustered Regularly Interspaced Short Palindromic Repeats (CRISPR)-associated transposon (CAST) system or one or more nucleic acids encoding the engineered CAST system, wherein the CAST system comprises at least one or all of: i) at least one Cas protein; ii) at least one transposon-associated protein; iii) at least one guide RNA (gRNA) complementary to at least a portion of a target nucleic acid sequence; and b) at least one integration co-factor protein, or a nucleic acid encoding thereof.

[0100] In some embodiments, the systems comprise a) an engineered Clustered Regularly Interspaced Short Palindromic Repeats (CRISPR)-associated transposon (CAST) system or one or more nucleic acids encoding the engineered CAST system, wherein the CAST system comprises at least one or all of: i) at least one Cas protein; ii) at least one transposon-associated protein; iii) at least one guide RNA (gRNA) complementary to at least a portion of a target nucleic acid sequence; b) a donor nucleic acid comprising a cargo nucleic acid sequence flanked by at least one engineered transposon end sequence; and c) at least one integration co-factor protein, or a nucleic acid encoding thereof.

[0101] In some embodiments, one or more of the at least one Cas protein are part of a ribonucleoprotein complex with the gRNA.

[0102] In some embodiments, the engineered CRISPR-Tn system is derived from Vibrio parahaemolyticus, Aliibrio sp., Pseudoalteromonas sp., Endozoicomonas ascidiicola, Vibrio cholerae, Photobacterium iliopiscarium, Vibrio parahaemolyticus, Pseudoalteromonas sp., Pseudoalteromonas ruthenica, Photobacterium ganghwense, Shewanella sp., Vibrio diazotrophicus, Vibrio sp. 16, Vibrio sp. F12, Vibrio splendidus, Aliivibrio wodanis, and Aliivibrio sp. Pseudoalteromonas sp. includes, but is not limited to, Pseudoalteromonas sp. SG43-3, Pseudoalteromonas sp. P1-13-1a, Pseudoalteromonas arabiensis, Pseudoalteromonas sp. Strain P1-25, Pseudoalteromonas sp. strain S983.

[0103] In some embodiments, the engineered transposon system is from a bacteria selected from the group consisting of: Vibrio cholerae strain 4874, Photobacterium iliopiscarium strain NCIMB, Pseudoalteromonas sp. P1-25, Pseudoalteromonas ruthenica strain S3245, Photobacterium ganghwense strain JCM, Shewanella sp. UCD-KL21, Vibrio cholerae strain OYP7G04, Vibrio cholerae strain M1517, Vibrio diazotrophicus strain 60.6F, Vibrio sp. 16, Vibrio sp. F12, Vibrio splendidus strain UCD-SED10, Aliivibrio wodanis 06/09/160, and Parashewanella spongiae strain HJ039. In an exemplary embodiment, the engineered transposon system is derived from Vibrio cholerae Tn6677. In an exemplary embodiment, the engineered transposon system is derived from Pseudoalteromonas Tn7016.

[0104] In some embodiments, the system comprises two or more engineered CAST systems. Pairing of orthogonal systems with their orthogonal donor substrates enables tandem insertion of multiple distinct payloads directly adjacent to each other without any risk of repressive effects from target immunity. For example, one, two, three, four, five, or more orthogonal CAST systems may be used to integrate large tandem arrays of payload DNA.

[0105] The system may be a cell free system. Also disclosed is a cell comprising the system described herein. In some embodiments, the cell is a prokaryotic cell. In some embodiments, the cell is a eukaryotic cell. In some embodiments, the cell is a mammalian cell (e.g., a cell of a non-human primate or a human cell). Thus, in some embodiments, disclosed herein are systems or kits for nucleic acid integration into a target nucleic acid sequence in a eukaryotic cell (e.g., a mammalian cell, a human cell).

a. Donor Nucleic Acid and Engineered Transposon Sequences

[0106] The system may further include a donor nucleic acid to be integrated. The donor nucleic acid may be a part of a bacterial plasmid, bacteriophage, a virus, autonomously replicating extra chromosomal DNA element, linear plasmid, linear DNA, linear covalently closed DNA, mitochondrial or other organellar DNA, chromosomal DNA, and the like.

[0107] In some embodiments, the donor nucleic acid comprises a cargo nucleic acid sequence. In some embodiments, the donor nucleic acid comprises a cargo nucleic acid sequence flanked by at least one engineered transposon end sequence. In some embodiments, the donor nucleic acid is flanked on the 5′ and the 3′ end with a transposon end sequence. In some embodiments, the donor nucleic acid comprises a cargo nucleic acid sequence flanked by one native transposon end sequence and one engineered transposon end sequence. In some embodiments, the donor nucleic acid comprises a cargo nucleic acid sequence flanked by two engineered transposon end sequences, a left end sequence 5′ to the cargo nucleic acid sequence, relative to transcription direction, and a right end sequence 3′ to the cargo nucleic acid sequence, relative to transcription direction.

[0108] The term “transposon end sequence” refers to any nucleic acid comprising a sequence capable of forming a complex with the transposase enzymes thus designating the nucleic acid between the two ends for rearrangement. Usually, native CRISPR-transposon end sequences contain inverted repeats and may be about 10-150 base pairs long. The engineered transposon end sequences, comprise sequences which have one or more basepair or nucleotide additions, deletions, or substitutions as compared to a native transposon end sequence. The engineered transposon ends sequences may or may not include additional sequences that promote or augment transposition, enhance binding to other protein factors, or allow the sequence to adopt an energetically favorable conformation state for binding.

[0109] In some embodiments, the engineered transposon end sequence comprises a sequence having one or more substitutions (e.g., 1, 2, 3, 4, 5, 6, 7, 8, 9, 10, 11, 12, 13, 14, 15, 16, 17, 18, 19, 20, 21, 22, 23, 24, 25, or more) as compared to a native transposon end sequence. In some embodiments, the engineered transposon end sequence comprises a sequence having one or more additions (e.g., 1, 2, 3, 4, 5, 6, 7, 8, 9, 10, 11, 12, 13, 14, 15, 16, 17, 18, 19, 20, 21, 22, 23, 24, 25, or more) as compared to a native transposon end sequence. In some embodiments, the engineered transposon end sequence comprises a sequence having one or more deletions (e.g., 1, 2, 3, 4, 5, 6, 7, 8, 9, 10, 11, 12, 13, 14, 15, 16, 17, 18, 19, 20, 21, 22, 23, 24, 25, or more) as compared to a native transposon end sequence. The engineered transposon end sequence may comprise a truncation of the native transposon end sequences. For example, in some embodiments, the transposon end sequence may have an approximate 10, 20, 30, 40, 50, 60, or more base pair (bp) deletion relative to the native CRISPR-transposon end sequence. The deletion may be in the form of a truncation at the distal (in relation to the cargo) end of the transposon end sequences. The deletion may be in the form of a truncation at the proximal (in relation to the cargo) end of the transposon end sequences.

[0110] In some embodiments, the at least one engineered transposon end sequence encodes an amino acid linker sequence. The engineered transposon end sequence may comprise a sequence related to the native transposon end sequence but lacking any stop codons. For example, the engineered transposon end sequence may comprise one or more point mutations which alter the encoded amino acids.

[0111] In some embodiments, the engineered transposon right end sequence and/or the engineered transposon left end sequence is derived from a Vibrio cholerae Tn6677 native transposon end sequence. In some embodiments, the engineered transposon right end sequence and/or the engineered transposon left end sequence is derived from a Pseudoalteromonas Tn7016 native transposon end sequence.

[0112] In some embodiments, the at least one engineered transposon end sequence is fully or partially AT rich. In some embodiments, the entirety of the transposon end sequence is AT rich. In some embodiments, a region of the transposon end sequence distal to the cargo nucleic acid is AT rich. For example, the distal 10 bp, 20 bp, 30 bp, 40 bp, 50 bp, or 60 bp may be AT rich. In some embodiments, a region of the transposon end sequence proximal to the cargo nucleic acid is AT rich. For example, the proximal 10 bp, 20 bp, 30 bp, 40 bp, 50 bp, or 60 bp may be AT rich. In some embodiments, regions outside of specific protein binding sites (e.g., TnsB binding sites) are AT rich.

[0113] Nucleic acid sequences containing a high level of A or T bases compared to the level of G or C bases are referred as AT rich or having high AT content. Accordingly, AT rich sequences can have relatively high levels of A bases, T bases or both A and T bases. Nucleic acid sequences having greater than about 52% AT content are AT rich sequences. In some embodiments, a portion of, as described above, or the entire transposon end sequence is greater than 55%, greater than 60%, greater than 65%, greater than 70%, greater than 75%, greater than 80%, greater than 85%, greater than 90%, greater than 95% or greater than 99% AT content.

[0114] In a CAST system, TnsB confers sequence specificity for the transposon ends through recognition of repetitive sequence elements known as TnsB binding sites (TBSs). The at least one engineered transposon end sequence(s) may comprise at least one (e.g., 1, 2, 3, 4, 5, or more) TBSs. In some embodiments, the at least one engineered transposon end sequence comprises two TBSs. In some embodiments, the at least one engineered transposon end sequence comprises three TBSs.

[0115] The engineered transposon sequence may comprise native transposase binding sites and/or engineered transposase binding sites which facilitate TnsB binding as the native site. The TBS may comprise any native or engineered sequence that facilitates recognitions by TnsB. In some embodiments, each TBS comprises a sequence individually selected from: CAMCCATAWRDTGATAWYKH (SEQ ID NO: 11), or CMMCBRWAWNNTGAHWWYWN (SEQ ID NO: 12), wherein each M is individually A or C: each W is independently A or T; each R is independently A or G; each D is independently A, G or T; each Y is independently T or C; each K is G or T; B is G, T, or C; and each H is independently A, C or T. In some embodiments, the TBS sequences are selected from those shown in FIGS. 2 & 7.

[0116] Each individual TBS may be separated from another TBS by one or more basepairs (bp). For example, any one TBS may be separated from the adjacent TBS by 0, 1, 2, 3, 4, 5, 6, 7, 8, 9, 10, or more bp. In some embodiments, the transposon end sequence comprises two immediately adjacent TBSs. In some embodiments, the transposon end sequence comprises two TBS separated by one to ten bp. In some embodiments, the transposon end sequence comprises two TBS separated by 30-40 bp.

[0117] In some embodiments, the at least one engineered transposon end sequence further comprises a 5 to 8 bp terminal end sequence. A terminal end sequence is any sequence that dictates the transposon boundary. In some embodiments, the terminal end sequence comprises a terminal TG dinucleotide. In some embodiments, the terminal end sequence is immediately adjacent to the distal end of TBS farthest from the cargo nucleic acid sequence. In some embodiments, the terminal end sequence is separated from the distal end of the transposase binding site farthest from the cargo nucleic acid sequence by 1, 2 or 3 basepairs (bp).

[0118] In some embodiments, the at least one engineered transposon end sequence is a transposon right end sequence 3 to the cargo nucleic acid sequence, relative to transcription direction. The engineered transposon right end sequence is at least about 50 basepairs (bp). In some embodiments, the engineered transposon right end sequence is at least about 55 bp, 60 bp, 70 bp, 75 bp, or more. In some embodiments, engineered transposon right end sequence is about 50 bp, about 55 bp, about 60 bp, about 65 bp, about 70 bp, about 75 bp, about 80 bp, about 85 bp, about 90 bp, about 95 bp, about 100 bp, about 105 bp, about 110 bp, about 115 bp, about 120 bp, about 125 bp, or more.

[0119] In some embodiments, the engineered transposon right end sequence comprises two TBSs. In some embodiments, the engineered transposon right end sequence comprises three TBSs. In some embodiments, the TBSs in the engineered transposon right end sequence are each less than 10 bp from the adjacent TBS. In select embodiments, the TBSs in the engineered transposon right end sequence are immediately adjacent or separated by 1 to 5 bp.

[0120] In some embodiments, the engineered transposon right end sequence comprises a sequence of: TGTTGATACAACCATAAAATGATAATTACACCCATAAATTGATAATTATCACACCCA (SEQ ID NO: 1), or a variant sequence having one or more substitutions thereof. In some embodiments, the engineered transposon right end sequence comprises a sequence of:

(SEQ ID NO: 2)
TGTgGATACAACCATAAAATGATAATTACACCCATAAATgGATcA
TTATCACcCCCA;
(SEQ ID NO: 3)
TGTgGATACAACCATAAAAcGATAATTACACCCATAAATgGATcA
TTATCACACCCA;
(SEQ ID NO: 4)
TGTgGATcCAACCATAAAATGATAATTACACCCATAAATgGATcA
TTATCACACCCA;
(SEQ ID NO: 5)
TGTTGATACAACCATAAAAgGATtATTACACCCATtAATTGATAA
TTATCACACCCA;
(SEQ ID NO: 6)
TGTTGATACAACCATcAAATGgTAATTACACCCATAAATTGATAA
TTATCACACCCA;
(SEQ ID NO: 7)
TGTTGATACAACCATtAAATGATAATTcCACCCATAAtTTGATAA
TTATCACACCCA;
or
(SEQ ID NO: 8)
TGTTGATACAACCATtAAATGgTAATTcCACCCAaAtATTGATAA
TTATCACACCCA.

[0121] In some embodiments, the engineered transposon right end sequence comprises a sequence of SEQ ID NOs: 18-844.

[0122] In some embodiments, the engineered transposon right end sequence comprises a sequence of: TGTTGATACAACCATAAAATGATAATTACACCCATAAATTGATAATATCACACCCATAAA TTGATATTGCCTCT (SEQ ID NO: 9), or a variant sequence having one or more substitutions thereof. In some embodiments, the engineered transposon right end sequence comprises a sequence of SEQ ID NOs: 845-2690.

[0123] In some embodiments, the engineered transposon right end sequence is hyperactive. Hyperactive transposon end sequences are those sequences which result in improved integration activity compared to wildtype, For example, hyperactive transposon end sequences may increase integration activity about 1.1 fold, about 1.2 fold, about 1.3 fold, about 1.4 fold, about 1.5 fold, about 1.6 fold, about 1.7 fold, about 1.8 fold, about 1.9 fold, about 2.0 fold, about 2.1 fold, about 2.2 fold, about 2.3 fold, about 2.5 fold, about 2.6 fold, about 2.7 fold, about 2.8 fold, about 2.9 fold, about 3.0 fold, or more. In some embodiments, the engineered transposon right end sequence comprises a sequence of SEQ ID NOs: 2691-2702. In some embodiments, the engineered transposon right end sequence comprises a sequence of SEQ ID NOs: 2703-3119.

[0124] In some embodiments, the at least one engineered transposon end sequence is a transposon left end sequence 5′ to the cargo nucleic acid sequence, relative to transcription direction. In some embodiments, the engineered transposon left end sequence is at least about 105 basepairs (bp). In some embodiments, the engineered transposon left end sequence is at least about 115 basepairs (bp). The engineered transposon left end sequence may be about 105 bp, about 110 bp, about 115 bp, about 120 bp, about 125 bp, about 130 bp, about 135 bp, about 140 bp, about 145 bp, about 150 bp, about 155 bp, about 160 bp, about 165 bp, about 170 bp, about 175 bp, about 180 bp, about 185 bp, about 190 bp, about 195 bp, about 200 bp, or more.

[0125] In some embodiments, the engineered transposon left end sequence comprises three transposase TBSs. The distal TBS, in reference to the cargo sequence may be separated from the next closest TBS by at least 10 bp. In some embodiments, the distal TBS is separated from the next closest TBS by about 20 bp to about 40 bp. In select embodiments, the distal TBS is separated from the next closest TBS by about 23-26 bp or about 30-35 bp. In some embodiments, the two proximal TBSs are separated from each other by less than 10 bp. In some embodiments the two proximal TBSs are separated from each other by 5-7 bp.

[0126] In some embodiments, the engineered transposon left end sequence further comprises an Integration Host Factor (IHF) binding site (IBS), as described above. In some embodiments, the engineered transposon left end sequence does not include an Integration Host Factor (IHF) binding site (IBS).

[0127] In some embodiments, the engineered transposon left end sequence comprises a sequence of: TGTTGATGCAACCATAAAGTGATATTTAATAATTATTTATAATCAGCAACTTAACCACAAA ACAACCATATATTGATATCTCACAAAACAACCATAAGTTGATATTITGTGAAT (SEQ ID NO: 10), or a variant sequence having one or more substitutions thereof. In some embodiments, the engineered transposon left end sequence comprises a sequence of SEQ ID NOs: 3120-4665.

[0128] In some embodiments, the engineered transposon left end sequence is hyperactive. In some embodiments, the engineered transposon left end sequence comprises a sequence of SEQ ID NOs: 4666-4673. In some embodiments, the engineered transposon left end sequence comprises a sequence of SEQ ID NOs: 4674-5135.

[0129] In some embodiments, the donor nucleic acid comprises a cargo nucleic acid sequence flanked by two engineered transposon end sequences; an engineered transposon right end sequence, as described above, and an engineered transposon left end sequence, as described above.

[0130] The cargo nucleic acid comprises a sequence encoding the desired nucleic acid to be inserted into the target nucleic acid.

[0131] The cargo nucleic acid may encode any peptide or polypeptide which is desired to be inserted into the target nucleic acid and is not limited by the type or identity of the peptide or polypeptide. For example, if the target site encodes an endogenous protein, the peptide or polypeptide may be so configured to form a fusion protein with the endogenous protein and the amino acid linker encoded by the transposon end sequence.

[0132] In some embodiments, the cargo nucleic acid sequence includes a peptide tag. The invention is not limited by the choice of peptide tag. Usually, a peptide tag is an amino acid sequence which facilitates the identification, detection, measurement, purification and/or isolation of the protein to which it is linked or fused. Peptide tags are usually relatively short compared to the protein fused to the peptide tag. As an example, peptide tags, in some embodiments, have amino acids of 4 or more lengths, such as 5, 6, 7, 8, 9, 10, 15, 20, or 25. Peptide tabs include, but are not limited to: HA (blood cell agglutinin), c-myc, simple herpesvirus glycoprotein D (gD), T7, GST, MBP, Strep tags, His tags, Myc tags, TAP tags, and FLAG tags. For example, if the target site encodes an endogenous protein, the cargo and peptide tag may be so configured to tag or label an endogenous protein and the amino acid linker encoded by the transposon end sequence.

[0133] In some embodiments, the cargo nucleic acid encodes a polypeptide. The invention is not limited by the choice of polypeptide. In select embodiments, the polypeptide comprises a fluorescent protein. “Fluorescent protein” refers to any protein capable of fluorescence when excited with appropriate electromagnetic radiation. This includes fluorescent proteins whose amino acid sequences are either natural or engineered.

[0134] The donor nucleic acid, and by extension the cargo nucleic acid, may of any suitable length, including, for example, about 50-100 bp (base pairs), about 100-1000 bp, at least or about 10 bp, at least or about 20 bp, at least or about 25 bp, at least or about 30 bp, at least or about 35 bp, at least or about 40 bp, at least or about 45 bp, at least or about 50 bp, at least or about 55 bp, at least or about 60 bp, at least or about 65 bp, at least or about 70 bp, at least or about 75 bp, at least or about 80 bp, at least or about 85 bp, at least or about 90 bp, at least or about 95 bp, at least or about 100 bp, at least or about 200 bp, at least or about 300 bp, at least or about 400 bp, at least or about 500 bp, at least or about 600 bp, at least or about 700 bp, at least or about 800 bp, at least or about 900 bp, at least or about 1 kb (kilobase pair), at least or about 2 kb, at least or about 3 kb, at least or about 4 kb, at least or about 5 kb, at least or about 6 kb, at least or about 7 kb, at least or about 8 kb, at least or about 9 kb, at least or about 10 kb, or greater.

b. Integration Co-Factor Protein

[0135] The present systems may further include at least one integration co-factor protein. The at least one integration co-factor protein may comprise Integration Host Factor (IHF), Factor for Inversion Stimulation (Fis), variants or derivatives thereof, or a combination thereof.

[0136] In some embodiments, the at least one integration co-factor protein comprises Integration Host Factor (IHF). In one embodiment, IHFα (also referred to as IHFα) and IHFβ (also referred to as IHFb) are provided as separate polypeptides. Alternatively, the IHFα and IHFβ subunits can be fused together to be expressed as a single polypeptide (See, Corona et al., Nucleic Acids Research 31, 5140-5148 (2003)). In certain embodiments, the single chain IHF (scIHF) is appended with various short sequences, such as NLS tags, on either the N-terminus or the C-terminus, or both termini, or encoded internally.

[0137] The at least one integration co-factor protein is not limited from which organism it is derived. In some embodiments, the IHF sequence is derived from the E. coli genome. In other embodiments, the IHF sequence is derived from the cognate strain from which the CRISPR-associated sequence is derived. For example, the IHFα and IHFβ sequences from Vibrio cholerae HE-45 can be used alongside RNA-guided DNA integration machinery derived from Tn6677, while IHFα and IHFβ sequences from Psuedoalteromonas sp. 5983 can be used alongside RNA-guided DNA integration machinery derived from Tn7016. In some embodiments, the at least one integration co-factor protein comprises an amino acid sequence of any of SEQ ID NOs: 5136-5152, See Table 3.

[0138] In some embodiments, the at least one integration factor protein sequences are fused to a localization agent (e.g., proteins or domains thereof to promote localization to the transposon ends). In one such embodiment, the at least one integration co-factor protein sequence is fused to a nuclease deficient Cas9 (dCas9). Then, using a sgRNA for Cas9 that targets nearby the at least one integration co-factor protein binding sequence within the transposon end, the local concentration of the at least one integration co-factor protein is increased to promote correct binding and bending of the transposon end. In other embodiments, other DNA-binding proteins are used to promote the localization of the at least one integration co-factor protein to the transposon, such as, but not limited to, TALE proteins and zinc-finger domain proteins.

[0139] The integration co-factor protein may be fused to protein components of Type I-F CRISPR-associated transposon systems to tether its location proximally to integration co-factor protein binding sites in the transposon ends. In some embodiments, the at least one integration co-factor protein is fused internally to a fusion construct of transposase proteins TnsA and TnsB, as described elsewhere herein. In some embodiments, the at least one integration co-factor protein is fused within the linker of the TnsA-TnsB fusion protein.

[0140] In some embodiments, the at least one integration co-factor protein is purified and pre-complexed with the donor DNA to ensure proper protein-DNA interactions. In such embodiments, the pre-formed complexes may be electroporated into cells or delivered via other means.

c. CAST System

[0141] CRISPR-Cas systems are currently grouped into two classes (1-2), six types (I-VI) and dozens of subtypes, depending on the signature and accessory genes that accompany the CRISPR array. The engineered CAST system herein may be derived from a Class 1 CRISPR-Cas system or a Class 2 CRISPR-Cas system.

[0142] Type I CRISPR-Cas systems encode a multi-subunit protein-RNA complex called Cascade, which utilizes a crRNA (or guide RNA) to target double-stranded DNA during an immune response. Cascade itself has no nuclease activity, and degradation of targeted DNA is instead mediated by a trans-acting nuclease known as Cas3.

[0143] The CAST system may be derived from a Type I CRISPR-Cas system (such as subtypes I-B and I-F, including I-F variants). In some embodiments, the engineered CAST is a Type I-F system. In some embodiments, the engineered CAST system is a Type I-F3 system.

[0144] In some embodiments, the engineered CAST system comprises Cas5, Cas6, Cas7, Cas8, or any combination thereof. In some embodiments, the engineered CAST system comprises Cas8-Cas5 fusion protein.

[0145] A CAST system of the present invention may comprise one or more transposon-associated proteins (e.g., transposases or other components of a transposon). The transposon-associated proteins may facilitate recognition or cleavage of the target nucleic acid and subsequent insertion of the donor nucleic acid into the target nucleic acid.

[0146] In some embodiments, the transposon-associated proteins are derived from a Tn7 or Tn7-like transposon. Tn7 and Tn7-like transposons may be categorized based on the presence of the hallmark DDE-like transposase gene, tnsB (also referred to as tniA), the presence of a gene encoding a protein within the AAA+ATPase family, tnsC (also referred to as tniB), one or more targeting factors that define integration sites (which may include a protein within the tniQ family, also referred to as tnsD, but sometimes includes other distinct targeting factors), and inverted repeat transposon ends that typically comprise multiple binding sites thought to be specifically recognized by the TnsB transposase protein. In Tn7, the targeting factors, or “target selectors,” comprise the genes tnsD and insE. Based on biochemical and genetics studies, it is known that TnsD binds a conserved attachment site in the 3′ end of the glmS gene, directing downstream integration, whereas TnsE binds the lagging strand replication fork and directs sequence-non-specific integration primarily into replicating/mobile plasmids.

[0147] The most well-studied member of this family of transposons is Tn7, hence why the broader family of transposons may be referred to as Tn7-like. “Tn7-like” term does not imply any particular evolutionary relationship between Tn7 and related transposons; in some cases, a Tn7-like transposon will be even more basal in the phylogenetic tree and thus Tn7 can be considered as having evolved from, or derived from, this related Tn7-like transposon.

[0148] Whereas Tn7 comprises tnsD and tnsE target selectors, related transposons comprise other genes for targeting. For example, Tn5090/Tn5053 encode a member of the tniQ family (a homolog of E. coli tnsD) as well as a resolvase gene tniR; Tn6230 encodes the protein TnsF; and Tn6022 encodes two uncharacterized open reading frames orf2 and orf3; Tn6677 and related transposons encode variant Type I-F and Type I-B CRISPR-Cas systems that work together with TniQ for RNA-guided mobilization; and other transposons encode Type V-U5 CRISPR-Cas systems that work together with TniQ for random and RNA-guided mobilization. Any of the above transposon systems are compatible with the systems and methods described herein.

[0149] In some embodiments, the one or more transposon-associated proteins comprise TnsA, TnsB, TnsC, or a combination thereof. In some embodiments, the one or more transposon-associated proteins comprise TnsB and TnsC. In some embodiments, the one or more transposon-associated proteins comprise TnsA, TnsB, and TnsC.

[0150] In some embodiments, the at least one transposon protein comprises a TnsA-TnsB fusion protein. TnsA and TnsB can be fused in any orientation: N-terminus to C-terminus: C-terminus to N-terminus; N-terminus to N-terminus; or C-terminus to C-terminus, respectively. Preferably the C-terminus of TnsA is fused to the N-terminus of TnsB.

[0151] In some embodiments, the TnsA-TnsB fusion may be fused using an amino acid linker peptide of various lengths to provide greater physical separation and allow more spatial mobility between the fused portions. The linker may comprise any amino acids and may be of any length. In some embodiments, the linker may be less than about 50 (e.g., 40, 30, 20, 10, or 5) amino acid residues.

[0152] In some embodiments, the linker is a flexible linker, such that TnsA and TnsB can have orientation freedom in relationship to each other. For example, a flexible linker may include amino acids having relatively small side chains, and which may be hydrophilic. Without limitation, the flexible linker may contain a stretch of glycine and/or serine residues. In some embodiments, the linker comprises at least one glycine-rich region. For example, the glycine-rich region may comprise a sequence comprising [GS]n, wherein n is an integer between 1 and 10.

[0153] In some embodiments, the linker further comprises a nuclear localization sequence (NLS). The NLS may be embedded within a linker sequence, such that it is flanked by additional amino acids. In some embodiments, the NLS is flanked on each end by at least a portion of a flexible linker. In some embodiments, the NLS is flanked on each end by a glycine rich region of the linker. Suitable nuclear localization sequences for use with the disclosed system are described further below and are applicable to use with the TnsA-TnsB fusion protein.

[0154] In some embodiments, the CAST system comprises TnsA, TnsB, TnsC, TnsD and TniQ. In some embodiments, the CAST system comprises Cas5, Cas6, Cas7, Cas8, TnsA, TnsB, TnsC, and at least one or both of TnsD or TniQ. In certain embodiments, the CAST system comprises TnsD. In certain embodiments, the CAST system comprises TniQ. In certain embodiments, the CAST system comprises TnsD and TniQ.

[0155] In some embodiments, any combination of the at least one Cas protein and the at least one transposon associated protein may be expressed as a single fusion protein.

[0156] Sequences of exemplary Cas proteins and transposon-associated proteins can also be found in International Patent Applications WO2020181264 and PCT/US22/32541, incorporated herein by reference. However, the invention is not limited to the disclosed or referenced exemplary sequences. Indeed, genetic sequences can vary between different strains, and this natural scope of allelic variation is included within the scope of the invention.

[0157] In other embodiments, any of the proteins described or referenced herein may comprise a sequence corresponding to, or substantially corresponding to, the wild-type version of the protein. For example, the sequence may substantially correspond to the wild-type protein sequence except for changes made for facile cloning or removal of known restriction sites. Thus, protein products from potential alternative start codons compared to the predicted nucleic acid sequences in this document are therefore not excluded.

[0158] Any of the proteins described or referenced herein may comprise one or more amino acid substitutions as compared to the recited sequences. An amino acid “replacement” or “substitution” refers to the replacement of one amino acid at a given position or residue by another amino acid at the same position or residue within a polypeptide sequence. Amino acids are broadly grouped as “aromatic” or “aliphatic.” An aromatic amino acid includes an aromatic ring. Examples of “aromatic” amino acids include histidine (H or His), phenylalanine (F or Phe), tyrosine (Y or Tyr), and tryptophan (W or Trp). Non-aromatic amino acids are broadly grouped as “aliphatic.” Examples of “aliphatic” amino acids include glycine (G or Gly), alanine (A or Ala), valine (V or Val), leucine (L or Leu), isoleucine (I or He), methionine (M or Met), serine (S or Ser), threonine (T or Thr), cysteine (C or Cys), proline (P or Pro), glutamic acid (E or Glu), aspartic acid (A or Asp), asparagine (N or Asn), glutamine (Q or Gin), lysine (K or Lys), and arginine (R or Arg).

[0159] The amino acid replacement or substitution can be conservative, semi-conservative, or non-conservative. The phrase “conservative amino acid substitution” or “conservative mutation” refers to the replacement of one amino acid by another amino acid with a common property. A functional way to define common properties between individual amino acids is to analyze the normalized frequencies of amino acid changes between corresponding proteins of homologous organisms (Schulz and Schirmer, Principles of Protein Structure, Springer-Verlag, New York (1979)). According to such analyses, groups of amino acids may be defined where amino acids within a group exchange preferentially with each other, and therefore resemble each other most in their impact on the overall protein structure (Schulz and Schirmer, supra). Examples of conservative amino acid substitutions include substitutions of amino acids within the sub-groups described above, for example, lysine for arginine and vice versa such that a positive charge may be maintained, glutamic acid for aspartic acid and vice versa such that a negative charge may be maintained, serine for threonine such that a free —OH can be maintained, and glutamine for asparagine such that a free —NH₂ can be maintained. “Semi-conservative mutations” include amino acid substitutions of amino acids within the same groups listed above, but not within the same sub-group. For example, the substitution of aspartic acid for asparagine, or asparagine for lysine, involves amino acids within the same group, but different sub-groups. “Non-conservative mutations” involve amino acid substitutions between different groups, for example, lysine for tryptophan, or phenylalanine for serine, etc.

[0160] In some embodiments, the engineered CAST systems further comprise a gRNA complementary to at least a portion of the target nucleic acid sequence, or a nucleic acid encoding the at least one gRNA.

[0161] The gRNA may be a crRNA, crRNA/tracrRNA (or single guide RNA, sgRNA). The terms “gRNA,” “guide RNA,” “crRNA,” and “CRISPR guide sequence” may be used interchangeably throughout and refer to a nucleic acid comprising a sequence that determines the binding specificity of the CAST system. A gRNA hybridizes to (complementary to, partially or completely) a target nucleic acid sequence (e.g., the genome in a host cell). In some embodiments, the at least one gRNA is encoded in a CRISPR RNA (crRNA) array.

[0162] The system may further comprise a target nucleic acid. In some embodiments, target nucleic acid sequence comprises a human sequence.

[0163] gRNAs or sgRNA(s) used in the present disclosure can be between about 5 and 100 nucleotides long, or longer (e.g., 5, 6, 7, 8, 9, 10, 11, 12, 13, 14, 15, 16, 17, 18, 19, 20, 21, 22, 23, 24, 25, 26, 27, 28, 29, 30, 31, 32, 33, 34, 35, 36, 37, 38, 39, 40, 41, 42, 43, 44, 45, 46, 47, 48, 49, 50, 51, 52, 53, 54, 55, 56, 57, 58, 59 60, 61, 62, 63, 63, 64, 65, 66, 67, 68, 69, 70, 71, 72, 73, 74, 75, 76, 77, 78, 79, 80, 81, 82, 83, 84, 85, 86, 87, 88, 89, 90, 91 92, 93, 94, 95, 96, 97, 98, 99, or 100 nucleotides in length, or longer). In some embodiments, the gRNA sequence that hybridizes to the target nucleic acid is 15, 16, 17, 18, 19, 20, 21, 22, 23, 24, 25, 26, 27, 28, 29, 30, 31, 32, 33, 34, 35, 36, 37, 38, 39, or 40 nucleotides in length.

[0164] To facilitate gRNA design, many computational tools have been developed (See Prykhozhij et al. (PLoS ONE, 10(3): (2015)); Zhu et al. (PLoS ONE, 9(9) (2014)); Xiao et al. (Bioinformatics. January 21 (2014)); Heigwer et al. (Nat Methods, 11(2): 122-123 (2014)). Methods and tools for guide RNA design are discussed by Zhu (Frontiers in Biology, 10 (4) pp 289-296 (2015)), which is incorporated by reference herein. Additionally, there are many publicly available software tools that can be used to facilitate the design of sgRNA(s); including but not limited to, Genscript Interactive CRISPR gRNA Design Tool, W U-CRISPR, and Broad Institute GPP sgRNA Designer. There are also publicly available pre-designed gRNA sequences to target many genes and locations within the genomes of many species (human, mouse, rat, zebrafish, C. elegans), including but not limited to, IDT DNA Predesigned Alt-R CRISPR-Cas9 guide RNAs, Addgene Validated gRNA Target Sequences, and GenScript Genome-wide gRNA databases.

[0165] In addition to a sequence that binds to a target nucleic acid, in some embodiments, the gRNA may also comprise a scaffold sequence (e.g., tracrRNA). In some embodiments, such a chimeric gRNA may be referred to as a single guide RNA (sgRNA). Exemplary scaffold sequences will be evident to one of skill in the art and can be found, for example, in Jinek, et al. Science (2012) 337(6096):816-821, and Ran, et al. Nature Protocols (2013) 8:2281-2308, incorporated herein by reference in their entireties.

[0166] In some embodiments, the gRNA sequence does not comprise a scaffold sequence and a scaffold sequence is expressed as a separate transcript. In such embodiments, the gRNA sequence further comprises an additional sequence that is complementary to a portion of the scaffold sequence and functions to bind (hybridize) the scaffold sequence.

[0167] As described elsewhere herein the protein and gRNA components of the system may be expressed and transcribed from the nucleic acids using any promoter or regulatory sequences known in the art. In some embodiments, the gRNA is transcribed under control of an RNA Polymerase II promoter. In some embodiments, the gRNA is transcribed under control of an RNA Polymerase III promoter.

[0168] In some embodiments, the gRNA sequence is at least 50%, 55%, 60%, 65%, 70%, 75%, 80%, 85%, 90%, 95%, 96%, 97%, 98%, 99%, or at least 100% complementary to a target nucleic acid. In some embodiments, the gRNA sequence is at least 50%, 55%, 60%, 65%, 70%, 75%, 80%, 85%, 90%, 95%, 96%, 97%, 98%, 99%, or at least 100% complementary to the 3′ end of the target nucleic acid (e.g., the last 5, 6, 7, 8, 9, or 10 nucleotides of the 3′ end of the target nucleic acid).

[0169] The gRNA may be a non-naturally occurring gRNA.

[0170] The system may further comprise a target nucleic acid having a target nucleic acid sequence. The target nucleic acid sequence may be any sequence of interest which facilitates modification. In some embodiments, the target nucleic acid sequence may comprise regions and sequence motifs which promote, influence, or facilitate TnsB strand transfer for integration of the donor nucleic acid.

[0171] The target nucleic acid sequence comprises both the site of gRNA binding and recognition but also the site of integration. Accordingly, the target nucleic acid sequence comprises the target-site duplication (TSD) region which upon insertion generates identical sequences on both sides of the insert. The TSD regions can be of variable length, usually between about 3 bp and about 8 bp, but sometimes longer. In some embodiments, the TSD region is 5 bp. In some embodiments, the TSD region comprises a YWR motif within the central three nucleotides of the target-site duplication (TSD). In some embodiments, the TSD region comprises a 5′-CWG-3′ motif.

[0172] The site of integration may be influenced by TSD motif as well as sequences upstream and/or downstream of the TSD region. In some embodiments, the nucleotide 3-bp upstream of the TSD is A, G, or T. In some embodiments, the nucleotide 3 bp downstream of the TSD is T, A, or C. Overall, C and G are less preferred for nucleotides 3 bp upstream and 3 bp downstream from the TSD.

[0173] In some embodiments, gRNAs may be selected for integration at defined and desired distances, ranging from ˜47-52 bp, or integration properties (e.g., homogenous vs. heterogeneous integration site) based on the target nucleic acid sequence, specifically the TSD region and the nucleotides 3 bp upstream and 3 bp downstream from the TSD. For example, the 3 end of the gRNA may be ˜47-52-bp upstream from the desired site of integration.

[0174] The target nucleic acid may be flanked by a protospacer adjacent motif (PAM). A PAM site is a nucleotide sequence in proximity to a target sequence. For example, PAM may be a DNA sequence immediately following the DNA sequence targeted by the CRISPR-Tn system.

[0175] The target sequence may or may not be flanked by a protospacer adjacent motif (PAM) sequence. In certain embodiments, a nucleic acid-guided nuclease can only cleave a target sequence if an appropriate PAM is present, see, for example Doudna et al., Science, 2014, 346(6213): 1258096, incorporated herein by reference. A PAM can be 5′ or 3′ of a target sequence. A PAM can be upstream or downstream of a target sequence. In one embodiment, the target sequence is immediately flanked on the 3′ end by a PAM sequence. A PAM can be 1, 2, 3, 4, 5, 6, 7, 8, 9, 10 or more nucleotides in length. In certain embodiments, a PAM is between 2-6 nucleotides in length. The target sequence may or may not be located adjacent to a PAM sequence (e.g., PAM sequence located immediately 3′ of the target sequence) (e.g., for Type I CRISPR/Cas systems). In some embodiments, e.g., Type I systems, the PAM is on the alternate side of the protospacer (the 5′ end). Makarova et al. describes the nomenclature for all the classes, types, and subtypes of CRISPR systems (Nature Reviews Microbiology 13:722-736 (2015)). Guide structures and PAMs are described in by R. Barrangou (Genome Biol. 16:247 (2015)).

[0176] Non-limiting examples of the PAM sequences include: CC, CA, AG, GT, TA, AC, CA, GC, CG, GG, CT, TG, GA, AGG, TGG, T-rich PAMs (such as TTT, TTG, TITC, etc.), NGG, NGA, NAG, NGGNG and NNAGAAW, NNNNGATT, NAAR (R=A or G), NNGRR (R=A or G), NNAGAA, and NAAAAC, where N is any nucleotide. In some embodiments, the PAM may comprise a sequence of CN, in which N is any nucleotide. In select embodiments, the PAM may comprise a sequence of CC.

[0177] “Complementarity” refers to the ability of a nucleic acid to form hydrogen bond(s) with another nucleic acid sequence by either traditional Watson-Crick or other non-traditional types. A percent complementarity indicates the percentage of residues in a nucleic acid molecule, which can form hydrogen bonds (e.g., Watson-Crick base pairing) with a second nucleic acid sequence. Full complementarity is not necessarily required, provided there is sufficient complementarity to cause hybridization. There may be mismatches distal from the PAM.

[0178] In some embodiments, when the system comprises TnsA, TnsB, TnsC, TnsD and TniQ binding to the target nucleic acid may be mediated through a TnsD binding site within the target nucleic acid sequence. Thus, the recognition of the target nucleic acid utilizing the systems described herein may proceed in a gRNA-dependent and/or -independent manner.

d. Nuclear Localization Sequence

[0179] In the systems disclosed herein, one or more of the at least one Cas protein, the at least one transposon-associated protein, or the integration co-factor protein may comprise a nuclear localization signal (NLS). The nuclear localization sequence may be appended to the one or more of the at least one Cas protein, the at least one transposon-associated protein and the integration co-factor protein at a N-terminus, a C-terminus, embedded in the protein (e.g., inserted internally within the open reading frame (ORF)), or a combination thereof.

[0180] In some embodiments, one or more of the at least one Cas protein, the at least one transposon-associated protein, and integration co-factor protein comprises two or more NLSs. The two or more NLSs may be in tandem, separated by a linker, at either end terminus of the protein, or embedded in the protein (e.g., inserted internally within the ORF instead).

[0181] The nuclear localization sequence may comprise any amino acid sequence known in the art to functionally tag or direct a protein for import into a cell's nucleus (e.g., for nuclear transport). Usually, a nuclear localization sequence comprises one or more positively charged amino acids, such as lysine and arginine.

[0182] In some embodiments, the NLS is a monopartite sequence. A monopartite NLS comprises a single cluster of positively charged or basic amino acids. In some embodiments, the monopartite NLS comprises a sequence of K-K/R-X-K/R, wherein X can be any amino acid. Exemplary monopartite NLS sequences include those from the SV40 large T-antigen, c-Myc, and TUS-proteins.

[0183] In some embodiments, the NLS is a bipartite sequence. Bipartite NLSs comprise two clusters of basic amino acids, separated by a spacer of about 9-12 amino acids. Exemplary bipartite NLSs include the NLS of nucleoplasmin, KR[PAATKKAGQA]KKKK (SEQ ID NO: 15), and the NLS of EGL-13, MSRRRKANPTKLSENAKKLAKEVEN (SEQ ID NO: 16). In some embodiments, the NLS comprises a bipartite SV40 NLS. In certain embodiments, the NLS comprises an amino acid sequence having at least 70% similarity to KRTADGSEFESPKKKRKV (SEQ ID NO: 17). In select embodiments, the NLS consists of an amino acid sequence of KRTADGSEFESPKKKRKV (SEQ ID NO: 17).

[0184] The protein components of the disclosed system (e.g., the Cas proteins, the transposon-associated proteins, or the integration co-factor protein) may further comprise an epitope tag (e.g., 3×FLAG tag, an HA tag, a Myc tag, and the like). In some embodiments, the epitope tag may be adjacent, either upstream or downstream, to a nuclear localization sequence. The epitope tags may be at the N-terminus, a C-terminus, or a combination thereof of the corresponding protein.

e. Nucleic Acids

[0185] The one or more nucleic acids encoding the engineered CAST system or the nucleic acid encoding the integration co-factor protein may be any nucleic acid including DNA, RNA, or combinations thereof. In some embodiments, nucleic acids comprise one or more messenger RNAs, one or more vectors, or any combination thereof.

[0186] The at least one Cas protein, the at least one transposon-associated protein, the at least one integration co-factor protein, the at least one gRNA, and the donor nucleic acid may be on the same or different nucleic acids (e.g., vector(s)). In some embodiments, the at least one Cas protein, the at least one transposon associated protein, and the at least one integration co-factor protein are encoded by different nucleic acids. In some embodiments, the at least one Cas protein and the at least one transposon associated protein encoded by a single nucleic acid. In some embodiments, the at least one Cas protein, the at least one transposon associated protein, and the at least one integration co-factor protein are encoded by a single nucleic acid. In some embodiments, the at least one gRNA is encoded by a nucleic acid different from the nucleic acid(s) encoding the at least one Cas protein, the at least one transposon associated protein, and the at least one integration co-factor protein. In some embodiments, the at least one gRNA is encoded by a nucleic acid also encoding the at least one Cas protein, the at least one transposon associated protein, the at least one integration co-factor protein, or a combination thereof. In some embodiments, the nucleic acid encoding the at least one Cas protein, at least one transposon associated protein, the at least one integration co-factor protein, the at least one gRNA, or any combination thereof further comprises the donor nucleic acid.

[0187] In select embodiments, a single nucleic acid encodes the gRNA and at least one Cas protein. The gRNA may be encoded anywhere in the nucleic acid encoding the at least one Cas protein. In some embodiments, the gRNA is encoded in the 3′ UTR of the Cas protein-coding gene.

[0188] The one or more nucleic acids encoding the protein components may further comprise, in the case of RNA, or encode, as in the case of DNA, a sequence capable of forming a triple helix adjacent to the sequence encoding the protein component. In some embodiments, the sequence capable of forming a triple helix is downstream of the protein coding sequence. In some embodiments, the sequence capable of forming a triple helix is in a 3′ untranslated region of the protein coding sequence.

[0189] A triple helix is formed after the binding of a third strand to the major groove of a duplex nucleic acid through Hoogsteen base pairing (e.g., hydrogen bonds) while maintaining the duplex structure of two strands making the major groove. Pyrimidine-rich and purine-rich sequences (e.g., two pyrimidine tracts and one purine tract or vice versa) can form stable triplex structures as a consequence of the formation of triplets (e.g., A-U-A and C-G-C).

[0190] In some embodiments, the triple helix forming sequence comprises two uracil-rich tracts and an adenosine-rich tract, each separated by linker or loop regions. As used herein, the term “A-rich tract” refers to a strand of consecutive nucleosides in which at least 80% of the consecutive nucleosides are adenosine. Similarly, the term “U-rich motif” refers to a strand of consecutive nucleosides in which at least 80% of the consecutive nucleosides are uridine.

[0191] In some embodiments, the triple helix sequence is derived from the 3′ terminal triple helix sequences of triple helix terminators from a long non-coding RNAs (lncRNAs), e.g., metastasis-associated lung adenocarcinoma transcript 1 (MALAT1).

[0192] One or more of the protein components of the system (e.g., the at least one Cas protein, the at least one transposon associated protein, the at least one integration co-factor protein) may comprise a sequence of an internal ribosome entry site (IRES) or a ribosome skipping peptide. This is particularly advantageous when a single nucleic acid or vector is used to express multiple components of the system.

[0193] The ribosome skipping peptide may comprise a 2A family peptide. 2A peptides are short (˜18-25 aa) peptides derived from viruses. There are four commonly used 2A peptides, P2A, T2A, E2A and F2A, that are derived from four different viruses. Any known 2A peptide sequence is suitable for use in the disclosed system.

[0194] In certain embodiments, engineering the system for use in eukaryotic cells may involve codon-optimization. It will be appreciated that changing native codons to those most frequently used in mammals allows for maximum expression of the system proteins in mammalian cells (e.g., human cells). Such modified nucleic acid sequences are commonly described in the art as “codon-optimized,” or as utilizing “mammalian-preferred” or “human-preferred” codons. In some embodiments, the nucleic acid sequence is considered codon-optimized if at least about 60% (e.g., 65%, 70%, 75%, 80%, 85%, 90%, 95%, or 98%) of the codons encoded therein are mammalian preferred codons. Furthermore, in some embodiments, engineering the CRISPR-Cas system involves incorporating elements of the native CRISPR array into the disclosed system.

[0195] The present disclosure also provides for DNA segments encoding the proteins and nucleic acids disclosed herein, vectors containing these segments and cells containing the vectors. The vectors may be used to propagate the segment in an appropriate cell and/or to allow expression from the segment (e.g., an expression vector). The person of ordinary skill in the art would be aware of the various vectors available for propagation and expression of a nucleic acid sequence.

[0196] The present disclosure further provides engineered, non-naturally occurring vectors and vector systems, which can encode one or more or all of the components of the present system. The vector(s) can be introduced into a cell that is capable of expressing the polypeptide encoded thereby, including any suitable prokaryotic or eukaryotic cell.

[0197] The vectors of the present disclosure may be delivered to a eukaryotic cell in a subject. Modification of the eukaryotic cells via the present system can take place in a cell culture, where the method comprises isolating the eukaryotic cell from a subject prior to the modification. In some embodiments, the method further comprises returning said eukaryotic cell and/or cells derived therefrom to the subject.

[0198] Viral and non-viral based gene transfer methods can be used to introduce nucleic acids encoding components of the present system into cells, tissues, or a subject. Such methods can be used to administer nucleic acids encoding components of the present system to cells in culture, or in a host organism. Non-viral vector delivery systems include DNA plasmids, cosmids, RNA (e.g., a transcript of a vector described herein), a nucleic acid, and a nucleic acid complexed with a delivery vehicle. Viral vector delivery systems include DNA and RNA viruses, which have either episomal or integrated genomes after delivery to the cell. Viral vectors include, for example, retroviral, lentiviral, adenoviral, adeno-associated and herpes simplex viral vectors.

[0199] In certain embodiments, plasmids that are non-replicative, or plasmids that can be cured by high temperature may be used, such that any or all of the necessary components of the system may be removed from the cells under certain conditions. For example, this may allow for DNA integration by transforming bacteria of interest, but then being left with engineered strains that have no memory of the plasmids or vectors used for the integration.

[0200] Drug selection strategies may be adopted for positively selecting for cells that underwent DNA integration. A donor nucleic acid may contain one or more drug-selectable markers within the cargo. Then presuming that the original donor plasmid is removed, drug selection may be used to enrich for integrated clones. Colony screenings may be used to isolate clonal events.

[0201] A variety of viral constructs may be used to deliver the present system (such as one or more Cas proteins, Tns proteins, integration co-factor protein(s), gRNA(s), donor DNA, etc.) to the targeted cells and/or a subject. Nonlimiting examples of such recombinant viruses include recombinant adeno-associated virus (AAV), recombinant adenoviruses, recombinant lentiviruses, recombinant retroviruses, recombinant herpes simplex viruses, recombinant poxviruses, phages, etc. The present disclosure provides vectors capable of integration in the host genome, such as retrovirus or lentivirus. See, e.g., Ausubel et al., Current Protocols in Molecular Biology, John Wiley & Sons, New York, 1989; Kay, M. A., et al., 2001 Nat. Medic. 7(1):33-40; and Walther W. and Stein U., 2000 Drugs, 60(2): 249-71, incorporated herein by reference.

[0202] In one embodiment, a DNA segment encoding the present protein(s) is contained in a plasmid vector that allows expression of the protein(s) and subsequent isolation and purification of the protein produced by the recombinant vector. Accordingly, the proteins disclosed herein can be purified following expression, obtained by chemical synthesis, or obtained by recombinant methods.

[0203] To construct cells that express the present system, expression vectors for stable or transient expression of the present system may be constructed via conventional methods as described herein and introduced into host cells. For example, nucleic acids encoding the components of the present system may be cloned into a suitable expression vector, such as a plasmid or a viral vector in operable linkage to a suitable promoter. The selection of expression vectors/plasmids/viral vectors should be suitable for integration and replication in eukaryotic cells.

[0204] In certain embodiments, vectors of the present disclosure can drive the expression of one or more sequences in prokaryotic cells. Promoters that may be used include T7 RNA polymerase promoters, constitutive E. coli promoters, and promoters that could be broadly recognized by transcriptional machinery in a wide range of bacterial organisms. The system may be used with various bacterial hosts.

[0205] In certain embodiments, vectors of the present disclosure can drive the expression of one or more sequences in mammalian cells using a mammalian expression vector. Examples of mammalian expression vectors include pCDM8 (Seed. Nature (1987) 329:840, incorporated herein by reference) and pMT2PC (Kaufman, et al., EMBO J. (1987) 6:187, incorporated herein by reference). When used in mammalian cells, the expression vector's control functions are typically provided by one or more regulatory elements. For example, commonly used promoters are derived from polyoma, adenovirus 2, cytomegalovirus, simian virus 40, and others disclosed herein and known in the art. For other suitable expression systems for both prokaryotic and eukaryotic cells see, e.g., Chapters 16 and 17 of Sambrook, et al., MOLECULAR CLONING: A LABORATORY MANUAL. 2nd eds., Cold Spring Harbor Laboratory, Cold Spring Harbor Laboratory Press, Cold Spring Harbor, N.Y., 1989, incorporated herein by reference.

[0206] Vectors of the present disclosure can comprise any of a number of promoters known to the art, wherein the promoter is constitutive, regulatable or inducible, cell type specific, tissue-specific, or species specific. In addition to the sequence sufficient to direct transcription, a promoter sequence of the invention can also include sequences of other regulatory elements that are involved in modulating transcription (e.g., enhancers, Kozak sequences and introns). Many promoter/regulatory sequences useful for driving constitutive expression of a gene are available in the art and include, but are not limited to, for example, CMV (cytomegalovirus promoter), EF1a (human elongation factor 1 alpha promoter), SV40 (simian vacuolating virus 40 promoter), PGK (mammalian phosphoglycerate kinase promoter), Ubc (human ubiquitin C promoter), human beta-actin promoter, rodent beta-actin promoter, CBh (chicken beta-actin promoter), CAG (hybrid promoter contains CMV enhancer, chicken beta actin promoter, and rabbit beta-globin splice acceptor), TRE (Tetracycline response element promoter), H1 (human polymerase III RNA promoter), U6 (human U6 small nuclear promoter), and the like. Additional promoters that can be used for expression of the components of the present system, include, without limitation, cytomegalovirus (CMV) intermediate early promoter, a viral LTR such as the Rous sarcoma virus LTR, HIV-LTR, HTLV-1 LTR, Maloney murine leukemia virus (MMLV) LTR, myeoloproliferative sarcoma virus (MPSV) LTR, spleen focus-forming virus (SFFV) LTR, the simian virus 40 (SV40) early promoter, herpes simplex tk virus promoter, elongation factor 1-alpha (EF1-α) promoter with or without the EF1-α intron. Additional promoters include any constitutively active promoter. Alternatively, any regulatable promoter may be used, such that its expression can be modulated within a cell.

[0207] Moreover, inducible and tissue specific expression can be accomplished by placing the nucleic acid encoding such a molecule under the control of an inducible or tissue specific promoter/regulatory sequence. Examples of tissue specific or inducible promoter/regulatory sequences which are useful for this purpose include, but are not limited to, the rhodopsin promoter, the MMTV LTR inducible promoter, the SV40 late enhancer/promoter, synapsin 1 promoter, ET hepatocyte promoter, GS glutamine synthase promoter and many others. Various commercially available ubiquitous as well as tissue-specific promoters and tumor-specific are available, for example from InvivoGen. In addition, promoters which are well known in the art can be induced in response to inducing agents such as metals, glucocorticoids, tetracycline, hormones, and the like, are also contemplated for use with the invention. Thus, it will be appreciated that the present disclosure includes the use of any promoter/regulatory sequence known in the art that is capable of driving expression of the desired protein operably linked thereto.

[0208] The vectors of the present disclosure may direct expression of the nucleic acid in a particular cell type (e.g., tissue-specific regulatory elements are used to express the nucleic acid). Such regulatory elements include promoters that may be tissue specific or cell specific. The term “tissue specific” as it applies to a promoter refers to a promoter that is capable of directing selective expression of a nucleotide sequence of interest to a specific type of tissue (e.g., seeds) in the relative absence of expression of the same nucleotide sequence of interest in a different type of tissue. The term “cell type specific” as applied to a promoter refers to a promoter that is capable of directing selective expression of a nucleotide sequence of interest in a specific type of cell in the relative absence of expression of the same nucleotide sequence of interest in a different type of cell within the same tissue. The term “cell type specific” when applied to a promoter also means a promoter capable of promoting selective expression of a nucleotide sequence of interest in a region within a single tissue. Cell type specificity of a promoter may be assessed using methods well known in the art, e.g., immunohistochemical staining.

[0209] Additionally, the vector may contain, for example, some or all of the following: a selectable marker gene, such as the neomycin gene for selection of stable or transient transfectants in host cells; enhancer/promoter sequences from the immediate early gene of human CMV for high levels of transcription; transcription termination and RNA processing signals from SV40 for mRNA stability; 5′- and 3′-untranslated regions for mRNA stability and translation efficiency from highly-expressed genes like α-globin or β-globin; SV40 polyoma origins of replication and ColE1 for proper episomal replication; internal ribosome binding sites (IRESes), versatile multiple cloning sites; T7 and SP6 RNA promoters for in vitro transcription of sense and antisense RNA; a “suicide switch” or “suicide gene” which when triggered causes cells carrying the vector to die (e.g., HSV thymidine kinase, an inducible caspase such as iCasp9), and reporter gene for assessing expression of the chimeric receptor. Suitable vectors and methods for producing vectors containing transgenes are well known and available in the art. Selectable markers also include chloramphenicol resistance, tetracycline resistance, spectinomycin resistance, streptomycin resistance, erythromycin resistance, rifampicin resistance, bleomycin resistance, thermally adapted kanamycin resistance, gentamycin resistance, hygromycin resistance, trimethoprim resistance, dihydrofolate reductase (DHFR), GPT; the URA3, HIS4, LEU2, and TRP1 genes of S. cerevisiae.

[0210] When introduced into the cell, the vectors may be maintained as an autonomously replicating sequence or extrachromosomal element or may be integrated into host DNA.

[0211] In one embodiment, the donor DNA may be delivered using the same gene transfer system as used to deliver the Cas protein, and/or transposon associated proteins (included on the same vector) or may be delivered using a different delivery system. In another embodiment, the donor DNA may be delivered using the same transfer system as used to deliver gRNA(s).

[0212] In one embodiment, the present disclosure comprises integration of exogenous DNA into the endogenous gene. Alternatively, an exogenous DNA is not integrated into the endogenous gene. The DNA may be packaged into an extrachromosomal or episomal vector (such as AAV vector), which persists in the nucleus in an extrachromosomal state, and offers donor-template delivery and expression without integration into the host genome. Use of extrachromosomal gene vector technologies has been discussed in detail by Wade-Martins R (Methods Mol Biol. 2011; 738:1-17, incorporated herein by reference).

[0213] The present system (e.g., proteins, polynucleotides encoding these proteins, donor polynucleotides and compositions comprising the proteins and/or polynucleotides described herein) may be delivered by any suitable means. In certain embodiments, the system is delivered in vivo. In other embodiments, the system is delivered to isolated/cultured cells (e.g., autologous iPS cells) in vitro to provide modified cells useful for in vivo delivery to patients afflicted with a disease or condition.

[0214] Vectors according to the present disclosure can be transformed, transfected, or otherwise introduced into a wide variety of cells. Transfection refers to the taking up of a vector by a cell whether or not any coding sequences are in fact expressed. Numerous methods of transfection are known to the ordinarily skilled artisan, for example, lipofectamine, calcium phosphate co-precipitation, electroporation, DEAE-dextran treatment, microinjection, viral infection, and other methods known in the art. Transduction refers to entry of a virus into the cell and expression (e.g., transcription and/or translation) of sequences delivered by the viral vector genome. In the case of a recombinant vector, “transduction” generally refers to entry of the recombinant viral vector into the cell and expression of a nucleic acid of interest delivered by the vector genome.

[0215] Any of the vectors comprising a nucleic acid sequence that encodes the components of the present system is also within the scope of the present disclosure. Such a vector may be delivered into host cells by a suitable method. Methods of delivering vectors to cells are well known in the art and may include DNA or RNA electroporation, transfection reagents such as liposomes or nanoparticles to delivery DNA or RNA; delivery of DNA, RNA, or protein by mechanical deformation (see, e.g., Sharei et al. Proc. Natl. Acad. Sci. USA (2013) 110(6): 2082-2087, incorporated herein by reference); or viral transduction. In some embodiments, the vectors are delivered to host cells by viral transduction. Nucleic acids can be delivered as part of a larger construct, such as a plasmid or viral vector, or directly, e.g., by electroporation, lipid vesicles, viral transporters, microinjection, and biolistics (high-speed particle bombardment). Similarly, the construct containing the one or more transgenes can be delivered by any method appropriate for introducing nucleic acids into a cell. In some embodiments, the construct or the nucleic acid encoding the components of the present system is a DNA molecule. In some embodiments, the nucleic acid encoding the components of the present system is a DNA vector and may be electroporated to cells. In some embodiments, the nucleic acid encoding the components of the present system is an RNA molecule, which may be electroporated to cells.

[0216] Additionally, delivery vehicles such as nanoparticle- and lipid-based mRNA or protein delivery systems can be used. Further examples of delivery vehicles include lentiviral vectors, ribonucleoprotein (RNP) complexes, lipid-based delivery system, gene gun, hydrodynamic, electroporation or nucleofection microinjection, and biolistics. Various gene delivery methods are discussed in detail by Nayerossadat et al. (Adv Biomed Res. 2012; 1: 27) and Ibraheem et al. (Int J Pharm. 2014 Jan. 1; 459(1-2):70-83), incorporated herein by reference.

### Methods

[0217] Also disclosed herein are methods for nucleic acid modification (e.g., insertion or deletion) utilizing the disclosed systems or kits. The methods may comprise contacting a target nucleic acid sequence with a system disclosed herein or a composition comprising the system. The descriptions and embodiments provided above for the engineered CAST system, the at least one integration co-factor protein, the gRN A, and the donor nucleic acid are applicable to the methods described herein.

[0218] The target nucleic acid sequence may be in a cell. In some embodiments, contacting a target nucleic acid sequence comprises introducing the system into the cell. As described above the system may be introduced into eukaryotic or prokaryotic cells by methods known in the art. In some embodiments, the cell is a mammalian cell. In some embodiments, the cell is a human cell.

[0219] In some embodiments, the target nucleic acid is a nucleic acid endogenous to a target cell. In some embodiments, the target nucleic acid is a genomic DNA sequence. The term “genomic,” as used herein, refers to a nucleic acid sequence (e.g., a gene or locus) that is located on a chromosome in a cell.

[0220] In some embodiments, the target nucleic acid encodes a gene or gene product. The term “gene product,” as used herein, refers to any biochemical product resulting from expression of a gene. Gene products may be RNA or protein. RNA gene products include non-coding RNA, such as tRNA, rRNA, micro RNA (miRNA), and small interfering RNA (siRNA), and coding RNA, such as messenger RNA (mRNA). In some embodiments, the target nucleic acid sequence encodes a protein or polypeptide.

[0221] The methods may be used for a variety of purposes. For example, the methods may include, but are not limited to, inactivation of a microbial gene, RNA-guided DNA integration in a plant or animal cell, methods of treating a subject suffering from a disease or disorder (e.g., cancer, Duchenne muscular dystrophy (DMD), sickle cell disease (SCD), fp-thalassemia, and hereditary tyrosinemia type I (HTI)), and methods of treating a diseased cell (e.g., a cell deficient in a gene which causes cancer).

[0222] The disclosed methods may be used to fuse or link an endogenous protein with the protein cargo encoded in the donor nucleic acid. In some embodiments, when the target nucleic acid sequence encodes a protein or polypeptide or is adjacent to a sequence encoding a protein or polypeptide, the donor nucleic acid having the engineered transposon end sequence encoding an amino acid linker and a peptide or polypeptide cargo fuses or links the endogenous protein with the peptide or polypeptide cargo upon successful insertion. Thus, the disclosure also provides methods of tagging a protein, e.g., an endogenous protein in a cell.

[0223] Polynucleotides containing the target nucleic acid sequence may include, but is not limited to, purified chromosomal DNA, total cDNA, cDNA fractionated according to tissue or expression state (e.g., after heat shock or after cytokine treatment other treatment) or expression time (after any such treatment) or developmental stage, plasmid, cosmid, BAC, YAC, phage library, etc. Polynucleotides containing the target site may include DNA from organisms such as Homo sapiens, Mus domesticus, Mus spretus, Canis domesticus, Bos, Caenorhabditis elegans, Plasmodium falciparum, Plasmodiwn vivax, Onchocerca volvulus, Brugia malayi, Dirofilaria immitis, Leishmania, Zea maize. Arabidopsis thaliana, Glycine max, Drosophila melanogaster, Saccharomnyces cerevisiae, Schizosaccharomyces pombe, Neurospora, Escherichia coli, Salmonella typhimuriwn, Bacillus subtilis, Neisseria gonorrhoeae, Staphylococcus aureus, Streptococcus pneumonia, Mycobacterium tuberculosis, Aquifex, Thermus aquaticus, Pyrococcus furiosus, Thermus littoralis, Methanobacterium thermoautotrophicum, Sulfolobus caldoaceticus, and others.

[0224] The methods may comprise administering to the subject, in vivo, or by transplantation of ex vivo treated cells, an effective amount of the described system. In some embodiments, the vector(s) is delivered to the tissue of interest by, for example, an intramuscular, intravenous, transdermal, intranasal, oral, mucosal, or other delivery methods.

[0225] The components of the present system or ex vivo treated cells may be administered with a pharmaceutically acceptable carrier or excipient as a pharmaceutical composition. In some embodiments, the components of the present system may be mixed, individually or in any combination, with a pharmaceutically acceptable carrier to form pharmaceutical compositions, which are also within the scope of the present disclosure.

[0226] In some embodiments, an effective amount of the components of the present system or compositions as described herein can be administered. As used herein the term “effective amount” may be used interchangeably with the term “therapeutically effective amount” and refers to that quantity that is sufficient to result in a desired activity upon administration to a subject in need thereof. Within the context of the present disclosure, the term “effective amount” refers to that quantity of the components of the system such that successful DNA integration is achieved.

[0227] When utilized as a method of treatment, the effective amount may depend on the particular condition being treated, the severity of the condition, the individual patient parameters including age, physical condition, size, gender and weight, the duration of the treatment, the nature of concurrent therapy (if any), the specific route of administration and like factors within the knowledge and expertise of the health practitioner. In some embodiments, the effective amount alleviates, relieves, ameliorates, improves, reduces the symptoms, or delays the progression of any disease or disorder in the subject. In some embodiments, the subject is a human.

[0228] In the context of the present disclosure insofar as it relates to any of the disease conditions recited herein, the terms “treat,” “treatment,” and the like mean to relieve or alleviate at least one symptom associated with such condition, or to slow or reverse the progression of such condition. Within the meaning of the present disclosure, the term “treat” also denotes to arrest, delay the onset (e.g., the period prior to clinical manifestation of a disease) and/or reduce the risk of developing or worsening a disease. For example, in connection with cancer the term “treat” may mean eliminate or reduce a patient's tumor burden, or prevent, delay, or inhibit metastasis, etc.

[0229] The phrase “pharmaceutically acceptable,” as used in connection with compositions and/or cells of the present disclosure, refers to molecular entities and other ingredients of such compositions that are physiologically tolerable and do not typically produce untoward reactions when administered to a subject (e.g., a mammal, a human). Preferably, as used herein, the term “pharmaceutically acceptable” means approved by a regulatory agency of the Federal or a state government or listed in the U.S. Pharmacopeia or other generally recognized pharmacopeia for use in mammals, and more particularly in humans. “Acceptable” means that the carrier is compatible with the active ingredient of the composition (e.g., the nucleic acids, vectors, cells, or therapeutic antibodies) and does not negatively affect the subject to which the composition(s) are administered. Any of the pharmaceutical compositions and/or cells to be used in the present methods can comprise pharmaceutically acceptable carriers, excipients, or stabilizers in the form of lyophilized formations or aqueous solutions.

[0230] Pharmaceutically acceptable carriers, including buffers, are well known in the art, and may comprise phosphate, citrate, and other organic acids; antioxidants including ascorbic acid and methionine; preservatives; low molecular weight polypeptides; proteins, such as serum albumin, gelatin, or immunoglobulins; amino acids; hydrophobic polymers: monosaccharides; disaccharides; and other carbohydrates; metal complexes; and/or non-ionic surfactants. See, e.g., Remington: The Science and Practice of Pharmacy 20th Ed. (2000) Lippincott Williams and Wilkins, Ed. K. E. Hoover.

### Kits

[0231] Also within the scope of the present disclosure are kits that include the components of the present system.

[0232] The kit may include instructions for use in any of the methods described herein. The instructions can comprise a description of administration of the present system or composition to a subject to achieve the intended effect. The instructions generally include information as to dosage, dosing schedule, and route of administration for the intended treatment. The kit may further comprise a description of selecting a subject suitable for treatment based on identifying whether the subject is in need of the treatment.

[0233] The kits provided herein are in suitable packaging. Suitable packaging includes, but is not limited to, vials, bottles, jars, flexible packaging, and the like.

[0234] The packaging may be unit doses, bulk packages (e.g., multi-dose packages) or sub-unit doses. Instructions supplied in the kits of the disclosure are typically written instructions on a label or package insert. The label or package insert indicates that the pharmaceutical compositions are used for treating, delaying the onset, and/or alleviating a disease or disorder in a subject.

[0235] Kits optionally may provide additional components such as buffers and interpretive information. Normally, the kit comprises a container and a label or package insert(s) on or associated with the container. In some embodiment, the disclosure provides articles of manufacture comprising contents of the kits described above.

[0236] The kit may further comprise a device for holding or administering the present system or composition. The device may include an infusion device, an intravenous solution bag, a hypodermic needle, a vial, and/or a syringe.

[0237] The present disclosure also provides for kits for performing DNA integration in vitro. The kit may include the components of the present system. Optional components of the kit include one or more of the following: buffer constituents, control plasmid, sequencing primers, cells, and the like.

### EXAMPLES

[0238] The following are examples of the present invention and are not to be construed as limiting.

### Materials and Methods

[0239] Cloning, testing, and analysis of pooled pDonor libraries. Donor plasmid (pDonor) libraries were generated by cloning transposon left or end variants into a donor plasmid, which was co-transformed with an effector plasmid (pEffector) that directed transposition into the E. coli genome (schematized in FIG. 1D). Each transposon end variant was associated with a unique 10-bp barcode that was used to uniquely identify variants in the sequencing approach, which relied on sequencing the starting plasmid libraries (input) and integrated products from genomic DNA (output) by NGS to determine the representation of each library member before and after transposition. To sequence the output, integration events in the T-RL and T-LR orientations were independently amplified using a cargo-specific primer flanking the transposon end and a genomic primer either upstream or downstream of the integration site. Custom python scripts compared each library member's representation in the output to its representation in the input, allowing calculation of the relative transposition efficiency of the custom transposon end variants.

[0240] To clone the transposon donor libraries, library variants were first generated as 200-nt single stranded pooled oligos (Twist Bioscience). 1 ng of oligoarray library DNA was PCR amplified for 12 cycles in 40 μL reactions using Q5 High-Fidelity DNA Polymerase (NEB) and primers specific to the right or left end library, in order to add restriction enzyme digestion sites. Amplicons were cleaned up and eluted in 45 μL mQ H₂O (QIAquick PCR Purification Kit). As the backbone vector, a plasmid encoding a 775-bp mini-transposon, delineated by 147-bp of the native transposon left end and 75-bp of the native transposon right end, on a pUC57 backbone was used. The backbone vector and library insert amplicons were digested (AscI and SapI for the right end library, and NcoI and NotI for the left end library) at 37° C. for 1 h, gel purified, and ligated in 20 μL reactions with T4 DNA Ligase (NEB) at 25° C. for 30 min. Ligation reactions were cleaned up and eluted in 10 μL mQ H₂O (MinElute PCR Purification Kit), and then used to transform electrocompetent NEB 10-beta cells in five individual electroporation reactions according to the manufacturer's protocol. After recovery (37° C. for 1 h), transformed cells were plated on large 245 mm×245 mm bioassay plates containing LB-agar with 100 μg/mL carbenicillin. Plates were scraped to collect cells, and plasmid DNA was isolated using the QIAGEN Plasmid Midi Kit.

[0241] Transposition experiments were performed in E. coli BL2I(DE3) cells, pEffector encoded a CRISPR array (repeat-spacer-repeat), a native tniQ-cas8-cas7-cas6 operon, and a native tnsA-tnsB-tnsC operon, all under the control of a single T7 promoter on a pCDFDuet-1 backbone. 2 μL of DNA solution containing 200 ng of pDonor and pEffector in equal molar amount was used to co-transform electrocompetent cells according to the manufacturer's protocol (Sigma-Aldrich). Four transformations were performed for each sample, and following recovery at 37° C. for 1 h, each transformation was plated on a large bioassay plate containing LB-agar with 100 μg/mL spectinomycin, 100 μg/mL carbenicillin, and 0.1 mM IPTG. Cells were grown at 37° C. for 18 h. Thousands of colonies were scraped from each plate, and genomic DNA was extracted using the Wizard Genomic DNA Purification Kit (Promega).

[0242] Next-generation sequencing (NGS) amplicons were prepared by PCR amplification using Q5 High-Fidelity DNA Polymerase (NEB). 250 ng of template DNA was amplified in 15 cycles during the PCR1 step. PCR1 samples were diluted 20-fold and amplified in 10 cycles during the PCR2 step. PCR1 primer pairs contained one pDonor backbone-specific primer and one transposon-specific primer (input library), or one genomic target-specific primer and one transposon-specific primer (output library). PCR amplicons were resolved by 2% agarose gel electrophoresis and gel-purified (QIAGEN Gel Extraction Kit). Libraries were quantified by qPCR using the NEBNext Library Quant Kit (NEB). Sequencing for both input and output libraries were performed using a NextSeq Mid or High Output Kit with 150-cycles (Illumina). Additionally, the input libraries were also sequenced using a MiSeq with 300-cycles (Illumina).

[0243] NGS data analysis was performed using custom Python scripts. Demultiplexed reads were filtered to remove reads that did not contain a perfect match to the 19-bp primer binding sequence at the 3′-terminus of the transposon end. Then, the 10-bp sequence directly downstream of the primer binding sequence was extracted, which encodes a barcode that uniquely identifies each transposon end variant. The number of reads containing each library member barcode was counted. If a read did not contain a barcode that matched a library member barcode, it was discarded. The barcode counts were summed across two NGS runs using the same PCR2 samples for the input libraries. Two biologically independent replicates were performed for the output libraries. The relative abundance of each library member was then determined by dividing the barcode count of each library member by the total number of barcode counts. The fold-change between the output and input libraries was calculated by dividing the relative abundance of each library member in the output library by its relative abundance in the input library. This fold-change was then normalized by dividing the fold-change of each library member by the average fold-change of four wildtype library members that contained identical transposon ends but unique barcodes.

[0244] One source of experimental noise in the approach came from PCR recombination, in which barcodes became uncoupled from their associated transposon end variants during PCR amplification. The frequency of uncoupling was quantified by performing long-read Illumina sequencing (MiSeq, 250 cycles) to sequence both the barcode and full-length transposon end, and found that not all barcodes were coupled to their correct transposon end sequence (FIG. 6B). However, uncoupled reads mapped to a diverse pool of sequences, with the most abundant incorrect sequence for each library member representing only a low percentage of total reads (FIG. 6C). These data therefore indicate that uncoupling events did not largely affect the ability to calculate relative integration efficiencies for each library member.

[0245] Sequence logos were generated with WebLogo 3.7.4, and the VchCAST sequence logo in FIG. 2B was generated from the six predicted TnsB binding sites. Consensus sequences were generated from the logo where bases with a bitscore >1 are represented as capital letters and bases with a bit score >1 are represented as small letters.

[0246] One limitation of the experimental setup is the inability to directly compare relative integration orientation within the same NGS libraries since integration events were amplified independently in the T-RL and T-LR orientations. Instead, approximate integration efficiencies were inferred by comparing the enrichment scores of transposon end variants to those of wildtype variants within the same library. All transposition assays with pDonor libraries were performed heterologously in E. coli under overexpression conditions, and thus subtleties of transposon end recognition and binding that depend on regulated TnsB expression levels may be obscured.

[0247] Cloning, testing, and analysis of pooled pTarget libraries. pTarget libraries were designed to include an 8-bp degenerate sequence positioned 42 bp downstream of one of two potential target sites, as schematized in FIG. 3B. Integration was directed to one of the two target sites flanking the degenerate sequence by a single plasmid (pSPIN) encoding both the donor molecule and transposition machinery under the control of a T7 promoter, on a pCDF backbone. To generate insert DNA for cloning the pTarget libraries, two partially overlapping oligos were annealed by heating to 95° C. for 2 min and then cooling to room temperature. Annealed DNA was treated with DNA Polymerase I, Large (Klenow) Fragment (NEB) in 40 μL reactions and incubated at 37° C. for 30 min, then gel-purified (QIAGEN Gel Extraction Kit). Double-stranded insert DNA and vector backbone was digested with BamHI and AvrII (37° C., I h); the digested insert was cleaned-up (MinElute PCR Purification Kit) and the digested backbone was gel-purified. Backbone and insert were ligated with T4 DNA Ligase (NEB), and ligation reactions were used to transform electrocompetent NEB 10-beta cells in four individual electroporation reactions according to the manufacturer's protocol. After recovery (37° C. for 1 h), cells were plated on large bioassay plates containing LB-agar with 50 μg/mL kanamycin. Thousands of colonies were scraped from each plate, and plasmid DNA was isolated using the QIAGEN Plasmid Midi Kit. Plasmid DNA was further purified by mixing with Mag-Bind TotalPure NGS Beads (Omega) at a vol:vol ratio of 0.60× and extracting the supernatant to remove contaminating fragments smaller than ˜450 bp.

[0248] 2 μL of DNA solution containing 200 ng of pTarget and pSPIN at equal mass amounts were used to co-transform electrocompetent E. coli BL21(DE3) cells according to the manufacturer's protocol (Sigma-Aldrich). Three transformations were performed and plated on large bioassay plates containing LB-agar with 100 μg/mL spectinomycin and 50 μg/mL kanamycin. Thousands of colonies were scraped from each plate, and plasmid DNA was isolated using the QIAGEN Plasmid Midi Kit.

[0249] Integration into pTarget yielded a larger plasmid than the starting input plasmid. To isolate the larger plasmid, a digestion step was performed that facilitated resolution of the integrated and unintegrated bands on an agarose gel, for extraction of the larger integrated plasmid. This digestion step was performed on both input and output libraries, digesting with NcoI-HF (37° C. for 1 h) and running them on a 0.7% agarose gel. The products were gel-purified (QIAGEN Gel Extraction Kit) and eluted in 15 μL EB in a MinElute Column (QIAGEN). 6.5 μL of cleaned-up DNA was used in each PCR1 amplification with Q5 High-Fidelity DNA Polymerase (NEB) for 15 cycles. PCR1 samples were diluted 20-fold and amplified in 10 cycles for PCR2. PCR1 primer pairs contained pTarget backbone-specific primers flanking a 45-bp region encompassing the degenerate sequence. Sequencing was performed with a paired-end run using a NextSeq High Output Kit with 150-cycles (Illumina).

[0250] NGS data analysis was performed using a custom Python script. Demultiplexed reads were filtered to remove reads that did not contain a perfect match to the 34- to 35-bp sequence upstream of the degenerate sequence for any i5-reads, or to the 45- to 46-bp sequence for any i7-reads. 35-bp and 46-bp was used for reads that were amplified from primers containing an additional nucleotide, which were used in PCR I to generate cluster diversity during sequencing. For all reads that passed filtering, the 8-bp degenerate sequence was extracted and counted. The integration distance was determined in the output libraries by examining the i5 read sequence at an integration distance of 43-bp to 56-bp downstream of each target for the presence of the transposon right or left end sequence (20-nt of each end). The degenerate sequence was then extracted from either or both of the i5 and i7 reads, depending on the integration position. The degenerate sequence counts were summed across the two primer pairs. The relative abundance was determined by dividing the degenerate sequence count by the total number of degenerate sequence counts. Finally, the fold-change between the output and input libraries was calculated by dividing the relative abundance of each degenerate sequence at each integration position in the output library by its relative abundance in the input library, and then log 2-transformed.

[0251] Sequence logos were generated with WebLogo 3.7.4. The preferred integration site logos in FIG. 8A were generated from all degenerate sequences that were enriched four-fold in the integrated products compared to the input. The overall preferred integration site logos in FIGS. 3C and 8D were generated by first applying the minimum threshold of four-fold enrichment in the integrated products compared to the input, and then selecting nucleotides from the top 5,000 enriched sequences across all integration positions. Nucleotides were selected from the top 5,000 sequences from each library, yielding a total of 10,000 nucleotides at each position.

[0252] Endogenous gene tagging experiments. All VchCAST constructs were subcloned from pEffector and pDonor as described previously, using a combination of inverse (around-the-horn) PCR, Gibson assembly, restriction digestion-ligation, and ligation of hybridized oligonucleotides. pEffector encodes a CRISPR array (repeat-spacer-repeat), a native tniQ-cas8-cas7-cas6 operon, and a native tnsA-tnsB-tnsC operon, all under the control of a single T7 promoter on a pCDFDuet-1 backbone. Donor plasmids (pDonor) were designed to encode a mini-transposon (mini-Tn) with a wild-type 147-bp transposon left end and 57-bp linker-coding right end variant, on a pUC19 backbone. For endogenous gene tagging experiments, superfolder GFP (sfGFP) lacking a ribosome binding site (rbs) and start codon was cloned into the mini-Tn cargo region, and the mini-Tn was further cloned into a temperature-sensitive pSIM6 backbone.

[0253] Linker functionality constructs were designed to encode sfGFP with an extended 32-amino acid (aa) loop region between the 10th and 11th β-strands, under the control of a single T7 promoter, as described by Feng and colleagues. Linker variants encoding 18-19 aa were subcloned into the 32-aa loop region as follows. An entry vector was generated on a pCOLADuet-I (pCOLA) vector harboring sfGFP, such that the 11th β-strand (GFP11) was replaced by the aforementioned extended 32-aa loop. Fragments encoding transposon right end linker variants and GFP11 were then amplified by conventional PCR and inserted into the extended loop region of the entry vector downstream of β-strands 1-10 (GFP1-10), such that total length of the loop remained constant at 32 aa.

[0254] To perform linker functionality assays, chemically competent E. coli BL21(DE3) cells were co-transformed with T7-controlled sfGFP linker functionality constructs (pCOLA) and an equal mass amount of empty pUC19 vector. Negative control transformants harbored either unfused sfGFP1-10 and sfGFP11 fragments on separate pCOLA and pUC19 backbones, respectively, or isolated sfGFP fragments. Transformed cells were plated on LB-agar plates with antibiotic selection (100 μg/mL carbenicillin, 50 μg/mL kanamycin), and single colonies were used to inoculate 200 μL of LB medium (100 μg/mL carbenicillin, 50 μg/mL kanamycin, 0.1 mM IPTG) in a 96-well optical-bottom plate. The optical density at 600 nm (OD600) was measured every 10 min, in parallel with the fluorescence signal for sfGFP, using a Synergy Neo2 microplate reader (Biotek) while shaking at 37° C. for 15 h. To derive normalized fluorescence intensities (NFI), all measured fluorescence intensities were divided by their corresponding OD600 values across all time points. A single representative NFI value was calculated per well by averaging all NFI values per well corresponding to OD600 values between 0.20 and 0.30, inclusive.

[0255] Transposition experiments were performed by transforming chemically competent E. coli BL21(DE3) cells harboring pEffector plasmids with pDonor plasmids by heat shock at 42° C. for 30 sec, followed by recovery in fresh LB medium. Recovery was performed at 30° C. for 1.5 h for temperature-sensitive pDonor plasmids, and 37° C. for 1 h for all other pDonor plasmids. Transformants were isolated on LB-agar plates containing the proper antibiotics and inducer (100 μg/mL carbenicillin, 50 μg/mL spectinomycin, 0.1 mM IPTG). After 43 h growth at 30° C. for temperature-sensitive pDonor plasmids, and 18 h growth at 37° C. for all other pDonor plasmids, samples were prepared for downstream qPCR analysis of integration efficiency or colony PCR identification of integration events.

[0256] For qPCR quantification, colonies were scraped from plates and resuspended in LB medium, and cell lysates were prepared for qPCR as described in Klompe, et al., (2019) Nature, 571, 219-225. Pairs of transposon- and target DNA-specific primers were designed to amplify fragments from integrated transposition products at the expected loci in either of two possible orientations. In parallel, a separate pair of genome-specific primers was designed to amplify an E. coli reference gene (rssA) for normalization purposes. qPCR reactions (10 μL) contained 5 μL of SsoAdvanced Universal SYBR Green Supermix (BioRad), 1 μL H2O, 2 μL of 2.5 μM primers, and 2 μL of hundredfold-diluted cell lysate and were prepared following transposition experiments as described above. Reactions were prepared in 384-well clear/white PCR plates (BioRad), and measurements were obtained in a CFX384 Real-Time PCR Detection System (BioRad). The following thermal cycling parameters were used: polymerase activation and DNA denaturation (98° C. for 3 min), and 35 cycles of amplification (98° C. for 10 s, 60° C. for 30 s). Each biological sample was analyzed in three parallel reactions: one reaction contained a primer pair for the E. coli reference gene, a second reaction contained a primer pair for one integration orientation, and a third reaction contained a primer pair for the other integration orientation. Transposition efficiency was calculated for each orientation as 2ΔCq, in which ΔCq is the Cq difference between the experimental and control reactions. Total transposition efficiency for a given experiment was calculated by summing transposition efficiencies across both orientations. All measurements presented were determined from three independent biological replicates.

[0257] For colony PCR identification of integration events, colonies were scraped from plates after transposition assays, resuspended in fresh LB medium, and re-streaked on LB-agar plates with the appropriate antibiotics and without IPTG inducer. To generate lysates, individual colonies were each transferred to 10 μL of H2O, followed by incubation at 95° C. for 2 min and centrifugation at 4,000 g for 5 min to pellet cell debris. Pairs of transposon- and target DNA-specific primers were designed to amplify fragments from integrated transposition products in the expected locus and orientation. In parallel, a separate pair of genome-specific primers was designed to amplify an E. coli reference gene (rssA) and determine whether the crude lysates were sufficiently dilute to allow successful amplification of the integrated transposition product. Transposition-less negative control samples were always analyzed in parallel with experimental samples to identify mispriming products that could result from the pDonor-containing crude lysates. PCR reactions (15 μL) contained 7.5 μL of 2× OneTaq 2× Master Mix with Standard Buffer (NEB), 5.9 μL H₂O, 0.6 μL of 10 μM primers, and 1 μL of undiluted cell lysate as described above. PCR amplicons were resolved by 1% agarose gel electrophoresis and visualized by staining with SYBR Safe (Thermo Scientific). To verify in-frame integration events, amplicons of the expected length were excised after gel electrophoresis, isolated by the Gel Extraction Kit (Qiagen), and sent for Sanger sequencing (GENEWIZ).

[0258] Fluorescence microscopy experiments were performed as follows. A pEffector plasmid was designed to C-terminally tag the native E. coli msrB gene by integrating a mini-Tn encoding a linker variant (ORF2a) and sfGFP cargo in-frame with the coding sequence, thereby interrupting the endogenous stop codon. Transposition experiments were performed as described above by transforming chemically competent E. coli BL21(DE3) cells harboring pEffector plasmids with temperature-sensitive pDonor plasmids. Colonies were then scraped and resuspended in fresh LB medium. Resuspensions were diluted and re-streaked on double antibiotic LB-agar plates lacking IPTG (100 μg/mL carbenicillin, 50 μg/mL spectinomycin). After overnight growth on solid medium at 37° C., individual colonies were used to inoculate liquid cultures (50 μg/mL spectinomycin) for overnight heat-curing at 37° C., followed by replica plating on single and double antibiotic plates to isolate heat-cured samples. In tandem, colony PCR and Sanger sequencing (GENEWIZ) were performed to identify colonies with in-frame transposition products as described above. In preparation for fluorescence microscopy, Sanger-verified samples were inoculated in overnight 37° C. liquid cultures. On the day of imaging, 500 μL of saturated overnight cultures were transferred to 5 ml of fresh LB medium with the appropriate antibiotics. Aliquots of the newly inoculated cultures were removed around the stationary or mid-log phases and immobilized in glass slides coated with partially dehydrated aqueous I % agarose-TAE pads. Immediately after immobilization, fluorescent microscopy was performed with a Nikon ECLIPSE 80i microscope using an oil immersion ×100 objective lens, which was equipped with a Spot CCD camera and SpotAdvance software. All images were processed in ImageJ by normalizing background fluorescence.

[0259] Generating and testing E. coli knockout mutants. E. coli genomic knockouts of ihfA, ihfB, ycbG, hupA, hupB, hns, and fis were generated using Lambda Red recombineering, as previously described (Sharan, S. K., et al., (2009) Nat Protoc, 4, 206-223). Knockouts were designed to replace of each gene with a kanamycin resistance cassette, which was PCR amplified with Q5 High-Fidelity DNA Polymerase (NEB) using primers that contained 50-nt homology arms to knockout gene locus. PCR amplicons were resolved on a 1% agarose gel and gel-purified, eluting with 40 μL MQ (QIAGEN Gel Extraction Kit). Electrocompetent E. coli BL21(DE3) cells were prepared containing a temperature-sensitive plasmid that encodes the Lambda Red machinery under the control of a temperature-sensitive promoter (pSIM6). Protein expression from the temperature-sensitive promoter was induced by incubating cells at 42° C. for 25 min immediately prior to electrocompetent cell preparation. 300-600 ng of each insert was used to transform cells via electroporation (2 kV, 200 Ω, 25 μF), and cells were recovered overnight at 30° C. by shaking in 3 mL of SOC media. After recovery, 250 μL of culture was spread on 100 mm standard plates (LB-agar with 50 μg/mL kanamycin) and grown overnight at 30° C. Kanamycin-resistant colonies were picked, and the genomic knock-in was confirmed by PCR amplification and Sanger sequencing using primer pairs flanking the knock-in locus.

[0260] VchCAST transposition experiments in E. coli knockout strains were performed by first preparing chemically competent WT and mutant cells and then transforming these strains with a single plasmid (pSPIN), which encodes the donor molecule and the native transposition machinery under the control of a T7 promoter and a crRNA targeting the lacZ genomic locus, on a pCDF backbone. After transformation by heat shock, cells were plated onto LB-agar with 100 μg/mL spectinomycin and 0.1 mM IPTG to induce protein expression, and incubated at 37° C. for 18 h. Hundreds of colonies were scraped from each plate, and integration efficiencies were quantified by the same qPCR assay described for the endogenous gene tagging experiments. Transposition experiments for other Type I-F homologs were performed as in the VchCAST experiments, except that the concentration of IPTG was reduced to 0.01 mM to mitigate toxicity.

[0261] Experiments that tested protein expression conditions in WT and ΔIHF cells were performed as described in the VchCAST transposition experiments. Promoters were varied from constitutive promoters (J23119, J23101) to inducible promoters (T7), for which different concentrations of IPTG were also tested.

[0262] For the complementation experiments, cells were co-transformed with pSPIN and a rescue plasmid (pRescue) that encoded both E. coli ihfA and ihfB under the control of separate T7 promoters on a pACYC backbone, and plated onto LB-agar with 100 μg/mL spectinomycin, 25 μg/mL chloramphenicol, and 0.1 mM IPTG to induce protein expression. Cells were incubated at 37° C. for 18 h, before colonies were scraped from each plate and integration efficiencies in both orientations were measured by qPCR.

[0263] To test DNA donor molecules with symmetric transposon ends, mutant pDonor encoding two right or two left transposon ends was cloned, and integration efficiency was measured by co-transforming pDonor with pEffector under the control of a T7 promoter on a pCDF backbone. Cells were plated onto LB-agar with 100 μg/mL spectinomycin, 100 μg/mL carbenicillin, and 0.1 mM IPTG and incubated at 37° C. for 18 h, before colonies were scraped from each plate and integration efficiencies in both orientations were measured by qPCR.

[0264] EcoTn7 transposition experiments and NGS analysis. To measure the integration efficiencies and distance distributions of EcoTn7 in WT and E. coli mutant cells, genomic primer binding sites were cloned into the mini-Tn cargo of a single plasmid for Tn7 transposition, which encoded a native tnsA-tnsB-tnsC-tnsD operon under the control of a constitutive pJ23119 promoter, on a pCDF backbone. The genomic primer binding sites were cloned adjacent to the transposon left and right ends such that the NGS amplicon length would be the same for unintegrated products and integrated products in either orientation (schematized in FIG. 12A). To quantify integration efficiencies using qPCR, primer pairs designed to amplify integrated products in both orientations, with one primer adjacent to the right transposon end a second primer either upstream or downstream of the integration site were used.

[0265] To quantify integration efficiencies by NGS, genomic DNA was amplified using a single primer pair with one primer complementary to the genomic primer binding site and the second primer complementary to the 3′-end of the glmS locus. Genomic DNA was extracted using the Wizard Genomic DNA Purification Kit (Promega). 250 ng of genomic was used in each PCR1 amplification with Q5 High-Fidelity DNA Polymerase (NEB) for 15 cycles. PCR1 samples were diluted 20-fold and amplified in 10 cycles for PCR2. Sequencing was performed with a paired-end run using a NextSeq High Output Kit with 150-cycles (Illumina).

[0266] NGS data analysis was performed using a custom Python script. Demultiplexed reads were filtered to remove reads that did not contain a perfect match to the first 65-bp of expected sequence resulting from either non-integrated genomic products or from integration events spanning 0-bp to 30-bp downstream of the glmS locus, and then counted the number of reads matching each of these possible products.

[0267] A table of plasmids used is provided in Table 9.

### Example 1

### Pooled Library to Characterize Transposon End Sequences

[0268] To systematically mutagenize the transposon left and right end sequences of V. cholerae Tn6677 large pooled oligoarray libraries, built off the previous study of the VchCAST system (Klompe, et al. (2019) Nature, 571, 219-225), were used. Starting with a minimal pDonor design that directed efficient genomic integration in both of two possible orientations (FIG. 1B), thousands of variants of the left (L) and right (R) end sequences, including truncations, base-pair substitutions, and transposase binding site modifications (FIGS. 1C, SEQ ID NOs: 845-2690 (right end) and SEQ ID NOs: 3120-4665 (left end)) were designed. Each variant was assigned a unique 8-bp barcode located between the mutagenized transposon end and the cargo, obviating the requirement to sequence across the entire transposon end to identify each variant. Each library also included four wildtype (WT) variants associated with unique barcodes, which were used to approximate the relative integration efficiency of each mutagenized library member. Libraries were then synthesized as single-stranded oligos, cloned into a mini-transposon donor (pDonor), and carefully characterized using next-generation sequencing (NGS), which demonstrated that all members were represented in the input sample for both transposon left and right end libraries (FIGS. 6A-D).

[0269] Transposition experiments were performed by transforming E. coli BL21(DE3) cells expressing the transposition machinery with pDonor encoding either the left end or right end library, amplifying successful genomic integration products in both orientations via junction PCR (FIG. 1D), and subjecting PCR products to NGS analysis. An enrichment score was then calculated for each variant, revealing a wide range of integration efficiencies, with most library members exhibiting diminished integration relative to the four WT samples (FIG. 6D). Finally, enrichment scores of the WT library members were used for normalization, yielding a score for each variant that represented its relative activity. To validate the approach, two biological replicates for each library transposition experiment were performed and strong concordance between both datasets was found, especially in the dominant T-RL integration orientation (FIG. 6E). Importantly, given the high degree of sequence similarity between library members, the background level of library member-barcode uncoupling was also rigorously determined, which established contributors of experimental noise in our datasets (FIGS. 6B-C and Methods).

[0270] The strength of the pooled-library approach was apparent by examining the effect of one category of variations, in which the transposon end sequences were sequentially mutated starting 120-nt into the transposon end, effectively creating end truncations, albeit without a change in overall mini-transposon size (FIG. 1E). These results revealed the minimal transposon end sequence length: in the left end, ˜105 bp were required for efficient integration, corresponding to all three predicted transposase (TnsB) binding sites, whereas in the right end, only ˜50 bp were required, corresponding to the first two transposase binding sites. These findings add single-bp resolution to the minimal transposon end sequences needed for efficient integration.

### Example 2

### Transposase Activity and Transposon End Sequences

[0271] TnsB is integral to the mobilization of Tn7-like transposons, in that it catalyzes the excision and integration chemistry while also conferring sequence specificity for the transposon ends through recognition of repetitive sequence elements known as TnsB binding sites (TBSs). Sequence analysis of the native VchCAST ends revealed three conserved TBSs in both the left and right ends (FIGS. 2A, 2B and 7A), and these sequences were verified by examining a mutational panel at single-bp resolution (FIGS. 2C and 7B). This dataset revealed that individual TBS point mutations can affect efficiency, particularly for positions 1, 6-9, and 12-14, but are not critical for integration. This more lenient sequence requirement is in line with recently published cryo-EM structures of DNA-bound TnsB from Tn7 and Type V-K CAST systems, which revealed that many protein-DNA interactions occur with the phosphodiester backbone rather than specific nucleobases.

[0272] Experiments with E. coli Tn7 showed that the internal TBSs are occupied before the more terminal sites. To test this if the few bases which account for the difference in the six TBSs of VchCAST, all possible combinations of TBSs for the left and right ends were tested, which are defined herein as L1-L3 and R1-R3 (FIG. 7C). For both VchCAST ends, site 1 displayed the greatest TBS preference and preferred the L1/L3/R1 sequence, whereas site 2 preferred L1/R1/R2 and site 3 exhibited the least TBS preference but favored L3. A preference for R1 was observed in the first position on the left end, and a preference for L I was observed in the first position on the right end, suggesting that transposition might be favored when the terminal end sequences are identical (whether based on equal affinity or otherwise).

[0273] Apart from regulating transposition frequency, TBS sequence identity could also explain the propensity of a given CAST system to cross-react with related transposon substrates. Previously VchCAST was shown to efficiently mobilize mini-transposon substrates from three homologous CAST systems, but not Tn7002. To determine which Tn7002 sequences were incompatible with mobilization by VchCAST machinery, chimeric transposon ends that contain parts of both the VchCAST and Tn7002 transposon ends were designed (FIG. 2D). The data revealed that chimeric left ends allowed for near WT integration efficiencies whereas chimeric right ends drastically decreased integration efficiency, likely due to the deleterious presence of a cytidine at position 9 of R1-R3 (FIG. 2D). Thus, TBS sequence identity imparts at least some constraints on the substrate recognition of a transposase for its cognate transposon DNA.

[0274] After testing a mutagenic panel in which the length between TBSs was systematically varied (FIGS. 2E and 7D), it was found that even single-bp perturbations caused drastic changes in integration efficiency. Additionally, an intriguing pattern of increasing and decreasing integration efficiencies were detected at roughly 10-bp intervals, suggesting that the three-dimensional positioning of transposase proteins on helical DNA is important for transposition.

### Example 3

### Transposase Sequence Preferences Influence Integration Site Patterns

[0275] VchCAST integration patterns differed in subtle but reproducible ways between distinct genomic target sites. Integration site patterns were compared for four endogenous E. coli target sequences, designated 4-7, either at their native genomic location or on an ectopic target plasmid by deep sequencing (FIG. 3A). Integration site patterns were notably distinct between the four targets but were highly consistent between genomic and plasmid contexts, suggesting that these patterns are dependent on local sequence alone and independent of other factors such as DNA replication or local transcription. Next, to disentangle contributions of the 32-bp target sequence (complementary to crRNA guide) from the downstream region including the integration site, target plasmids that contained chimeras of the four target regions were tested (FIG. 3A). Remarkably, integration patterns for these chimeric substrates closely mirrored the patterns observed for the non-chimeric substrates when the ‘downstream region’ was kept constant, indicating that the 32-bp target sequence does not modulate selection of the integration site.

[0276] To test if TnsB might exhibit local sequence preferences immediately at the site of DNA insertion, and explain the observed heterogeneity in integration site patterns, a target plasmid (pTarget) library encoding two target sequences flanking an 8-bp degenerate sequence was generated, such that integration events directed by a crRNA matching either target would lead to insertion directly into the degenerate 8-mer sequence (FIG. 3B). The target plasmids were sequenced before and after transposition and the representation of integration site sequences were compared to determine which sequences were enriched after transposition. These analyses revealed striking nucleotide preferences at conserved positions relative to the integration site (FIGS. 3C and 8A). Specifically, there were clear biases for a YWR motif within the central three nucleotides of the target-site duplication (TSD), as well as a preference for D (A, T, or G) and H (A, T, or C) at the −3 and +3 positions relative to the TSD, respectively.

[0277] To further explore the deterministic role of the preferred motif within the TSD, the distribution of reads containing a central 5′-CWG-3′ motif at different positions within the degenerate sequence was plotted. This motif was a focus because it favored a more unimodal distribution for the integration site by avoiding a centrally-preferred A or T nucleotide flanking the W. This motif was predictive of the preferred integration site distance that was sampled by VchCAST (FIG. 3D). By plotting the distribution of reads containing multiple 5′-CWG-3′ motifs within the integration site, it was found that two copies of this preferred motif within the integration site conferred a bimodal distribution, wherein there were not one but two preferred integration sites within the degenerate sequence (FIG. 8B). Finally, the library data was leveraged to predict the integration site distribution of previously targeted locations and could explain their differences at single-bp resolution (FIG. 8E).

[0278] Both of the two distinct crRNAs and corresponding target sites on pTarget yielded consistent sequence preferences for both the TSD and +/−3-bp positions (FIG. 8A), but it was surprising to find that the preferred integration distance was shifted by 1-bp when comparing the two (FIG. 8C). This difference could have been due to sequence preferences at the +/−3-bp position that fell outside the degenerate sequence, and indeed, when the sequences flanking the 8-mer library were examined, it was found that the downstream target (target B) contained a disfavored nucleotide in the −3-bp position for insertions that would occur with the 49-bp distance (FIG. 8D).

### Example 4

### Role of Boundary Sequences and Right End Internal Features on DNA Integration

[0279] VchCAST and many other Tn7-like transposons encode an 8-bp terminal end immediately adjacent to the first transposase binding site, with the terminal TG dinucleotide highly conserved among a broad spectrum of transposons including IS3, Tn7, Mu and even retrotransposons. Integration data with library variants that featured mutations within these terminal residues revealed that positions 1-3, but not 4-8, were critical for efficient transposition (FIG. 9B). This result is consistent with the DNA-bound cryo-EM structure of TnsB from a Type V-K CAST system. However, library variants with mutations in the 5-bp sequence flanking the mini-transposon were integrated with equivalent efficiencies (FIG. 9A), indicating that transposition machinery does not exhibit sequence specificity within this region.

[0280] To investigate whether the spacing between the terminal TG dinucleotide and the first TBS mattered, variants that modulated the distance between the 8-bp terminal end and TBS1 were tested (FIG. 9C). Adding a single base pair in either the left or right end still allowed for efficient transposition, whereas transposition was completely ablated with the removal of 1 bp or addition of 2 bp, indicating tight control over this spacing. Interestingly, larger bp additions or deletions between the TG dinucleotide and first TBS were in some cases also permitted, but always with a concomitant shift in the transposon boundary that was actually mobilized and integrated at the target site (FIG. 9C); in all cases, transposition still required a terminal TG. These data therefore suggest that a controlling feature within the terminal end sequence is the TG dinucleotide, and that the ˜8-bp spacing between this dinucleotide and the first TBS is a constraint for efficient transposition.

[0281] Previous work suggested that the palindromic sequence found 97-107 bp from the transposon right end boundary might affect integration orientation, possibly by promoting transcription of the tnsABC operon, which would be consistent with empirical expression data and the AT-richness of the transposon end. To test this possibility, the palindromic sequence was mutated and variants with this sequence shifted the orientation preference towards T-LR, with just one arm of the palindrome (Pa) being sufficient to shift the orientation bias (FIGS. 9D-E). Constitutive promoters were included in place of the palindromic sequence and it was found that promoters directing transcription inwards (towards the cargo) did not impact integration orientation, whereas promoters directed outwards (across the right end) shifted the orientation preference towards T-LR, perhaps by antagonizing stable assembly of TnsB selectively at the right end (FIG. 9F).

### Example 5

Endogenous Protein Tagging with Rationally Engineered Right Ends

[0282] The left and right end sequences facilitate transposon DNA recognition and excision/integration, and transposition products therefore include these sequences as ‘scars’ at the site of insertion. To convert these scars into functional sequences that encode amino acid linkers for downstream protein tagging applications, the shorter right end, starting with a minimal 57-bp sequence, was found to have stop codons in all three possible open reading frames (ORF) for the WT sequence (FIG. 4A). When a library of rationally designed right end variants (SEQ ID NOs: 18-844, Tables 1 &2) that replaced stop codons and codons encoding bulky and/or charged amino acids was tested (FIG. 10D), numerous candidates for each possible ORF that maintained near-wild-type integration efficiency were identified (FIG. 10A; SEQ ID NOs: 1-8; Tables 2 and 4). After validating library data by testing individual linker variants for genomic integration in E. coli (FIG. 4B), a fluorescence-based assay was designed to test for functionality of the encoded amino acid linkers.

[0283] GFP naturally consists of eleven β-strands that are connected by small loop regions, and a prior study demonstrated that the loop region between the 10^{th} and 11^{th} β-strand can be extended with novel linker sequences while still allowing for proper folding and fluorescence of the variant GFP protein. Selected transposon right end variants were cloned into the loop region between J3-strand 10 and 11 and GFP fluorescence intensity was measured after expression of each construct, revealing a subset of variants that were fully functional (FIGS. 4C and 10B). Next, the endogenous E. coli gene nsrB was selected for C-terminal tagging in a proof-of-concept experiment (FIG. 4D). After generating a pDonor construct that encodes a right end linker variant with an adjacent, in-frame GFP gene lacking a promoter or start codon, transposition experiments followed by Sanger sequencing were used to verify that integration interrupted the endogenous stop codon while placing the linker and GFP sequence directly in-frame. Finally, proper expression of MsrB-GFP fusion proteins was analyzed by analyzing cells via fluorescence microscopy that received either the WT transposon right end or the linker variant, demonstrating that only the modified right end variant elicited the expected cellular fluorescence (FIGS. 4D and IOC). To confirm that GFP was translationally fused to MsrB, we performed an anti-GFP western blot and found that GFP was not detected in the WT transposon end fusion but was detected at the expected size in the modified linker variant (FIG. 4E). Together, these data provide the basis for new genome engineering tools that allow for facile, endogenous gene tagging with single-bp control.

### Example 6

### Integration Host Factor (IHF) Binds the Left Transposon End to Stimulate Transposition

[0284] Closer inspection of the transposon left end mutational data revealed a sequence between the two terminal TnsB binding sites (TBSs) that, when mutated, led to reproducible transposition defects (FIG. 5A). The corresponding DNA sequence perfectly matched a consensus binding sequence for Integration Host Factor (IHF), a heterodimeric nucleoid-associated protein (NAP) that binds to the consensus sequence 5′-WATCARNNNNTTR-3′ and induces a DNA bend of more than 160°. First identified as a host factor for bacteriophage λ integration, IHF is also involved in diverse cellular activities including chromosome replication initiation, transcriptional regulation, and various site-specific recombination pathways.

[0285] Visual examination of the transposon left ends of twenty homologous systems revealed a highly conserved IBS across all homologs (FIGS. 5D and 5E), and aligning the sequence between the first two TBSs using Clustal Omega also revealed the IBS consensus as a conserved feature (FIG. 11B). To test whether IHF stimulated transposition for these systems, experiments were performed in WT and ΔIHF cells for five other systems and only two (Tn7000 and Tn7014) showed a strong IHF dependence (FIG. 5F).

[0286] Given the involvement of IHF and, more generally, the importance of donor/target DNA supercoiling and topology for other mobile elements, we decided to broadly investigate whether other E. coli NAPs might play a role in transposition. After generating individual knockouts of 5 additional nucleoid-associated proteins (NAP) genes (ycbG, hupA, hupB, hns, and fis) and measuring integration efficiency within these mutant backgrounds, only the loss of fis decreased integration efficiency, by 2-fold (FIG. 11F). When the same cohort of NAP knockouts were tested for transposition with the prototypic Tn7 system, IHF had no effect whereas Fis (factor for inversion stimulation) again influenced integration efficiency, though with a ˜4-fold increase in the knockout strain (FIG. 12B).

[0287] Interestingly, the amplicon-sequencing detection approach for E. coli Tn7 transposition also yielded new information about the nature of DNA integration products for the well-studied TnsABCD pathway. Whereas prior studies concluded that TnsD binding defines a single integration site downstream of the essential glmS gene, surprisingly heterogeneous insertion patterns were observed that sampled a wider sequence space, including rare but reproducible transposition products in the less-common T-LR orientation (FIG. 12C). These findings highlight the value of deep sequencing to thoroughly and unbiasedly query the range of potential integration products for a given transposable element.

[0288] After testing bidirectional transposition for two CAST systems in both a WT and ΔIHF strain of E. coli, it was found that although the loss of IHF did not affect orientation preference for VchCAST, its loss reversed the dominant orientation for Tn7000 from T-RL to T-LR (FIG. 12C). This result raised the intriguing possibility that IHF may be involved in establishing a transpososome architecture that controls the directionality of DNA insertions, at least for some systems. Previous work with the prototypic Tn7 system found that transposon substrates with two right ends were competent for integration whereas two left ends were not. The loss of IHF had no impact on transposition with a substrate containing two transposon right ends, which was integrated without orientation bias, while a substrate containing two left ends exhibited severely reduced integration efficiency that retained a dependence on IHF (FIGS. 12D-E). Overall, the data support a model (FIG. 5G) in which IHF binds the region between TBSs L1 and L2 to bend the transposon left end and drive DNA integration, akin to the proposed role of HU in Mu transposition. Exemplary sequences of IHF constructs are shown in Table 3.

### Example 7

### Hyperactive Tn6677 Transposon End Variants

[0289] A pooled library-based cellular transposition assay was developed in order to test a large panel of modified transposon end variants. In initial transposon end library experiments, the efficiency of the wild-type (unmodified) transposon substrate, with native end sequences, was high (˜80% efficiency), which limited the ability to confidently identify variants with improved integration activity compared to wildtype. In order to identify hyperactive variants, a modified experimental approach was established in which the overall system on WT transposon end substrates was less active. Cells were plated on media lacking inducer (IPTG), which reduced integration efficiency in the dominant T-RL orientation by approximately 3-fold (FIG. 21A). Then, the transposon end library experiment were repeated using this hypoactive condition, allowing detection of transposon end variants that exhibited hyperactive activity relative to WT. These variants increased transposition efficiency by between 1.5-2.5-fold (FIG. 21B, Tables 5 and 6).

[0290] In the transposon right end, hyperactive variants contained mutations in the sequence adjacent to the TnsB binding sites (the right end “stuffer” sequence, illustrated in FIG. 21C). The strongest hyperactive variant contained a binding site for the factor H-NS in this region, while other hyperactive variants contained mutations in this region, either through the addition of binding sites for other DNA-binding proteins, or through mutations that randomly varied the GC-richness of this region. In the left transposon end, hyperactive variants contained mutations in the transposon ends that converted the sequence to be more similar to the transposon end sequence of a related Type I-F CAST homolog, known as Tn7002.

[0291] To confirm that mutating the right end “stuffer” sequence was able to increase transposition efficiency, several transposon end variants with mutations in this sequence were cloned and the integration efficiency of these variants was directly measured individually, in a non-library format. Mutations that introduced binding sites for two DNA-binding and bending proteins, IHF or H-NS, both increased transposition efficiency relative to WT (FIG. 21C). Although these variants increased integration in a E. coli bacterial cell context in which these factors are naturally expressed, the improved integration efficiencies may be generalizable across any cell type of interest for these engineered transposon end sequences, whether or not the DNA binding/bending protein factors are present.

### Example 8

### Hyperactive Tn7016 Transposon End Variants

[0292] Using the above, a panel of putative hyperactive transposon end sequences were designed for a related CAST system, Tn7016, which shows significantly higher RNA-guided DNA integration activity in mammalian cells. The design of these variants, listed as SEQ ID NOs: 2703-3119 for right end variants and SEQ ID NOs: 4674-5135 for left end variants, was directly informed by mutations that increased the activity of RNA-guided DNA integration for Tn6677. The tested variants include rationally engineered modifications with added binding sites for DNA-binding and bending proteins; modifications that convert the transposon ends to be more similar to the transposon end sequences from homologous CAST systems; modifications that mutate the transposon right end such that the modified sequence encodes functional protein linkers without any in-frame stop codons; and modifications that systematically vary the GC-richness of the sequence adjacent to the TnsB binding sites within either transposon end. Mutations to either the left or right transposon end sequence, or to both transposon end sequences concurrently, in order to incorporate these aforementioned sequence features, result in increased DNA integration activity of the Tn7016 CAST system. These mutations also modify the orientation preference between T-RL and T-LR of a CAST system of interest. These variants are currently designed with modifications to either the transposon right end or the transposon left end, however hyperactive transposon left and right end variants are combined to further increase DNA integration activity.

[0293] This transposon end library is cloned into a pDonor substrate which is used in various cell types that may include bacterial cells, plant cells, animal cells, or human cells. For example, the pDonor library is used to transfect mammalian cells together with the necessary CAST protein and RNA machinery, and targeted sequencing of the integration product is performed, in order to uncover transposon end modifications with hyperactivity. Library members with enriched sequence abundances after integration are further investigated as highly active transposon end variants in human cells.

[0294] Library members may include variants in which the transposon end does not contain stop codons in any reading frame. These modifications enable mini-transposon genetic payloads to be integrated directly into or downstream of a gene body, such that read-through translation across the transposon end enables seamless fusions, at the protein level, with custom polypeptides encoded within the genetic payload of the transposon. These transposon end variants are used to enable protein tagging, in which targeted integration occurs immediately downstream of the start codon, or immediately upstream of the stop codon, of a gene of interest. Therefore, translation will read through the transposon, appending a sequence of interest to a target protein encoded within the genome.

TABLE 1
Library of transposon right end variant sequences tested for transposition

| | | |
|---|---|---|
| SEQ | | |
| ID | DNA sequence 5′ → 3′ (57 bp: | |
| NO | TIR-R1-R2-Space-[R3) | Amino Acid sequence |

Frame 1

| | | |
|---|---|---|
| 18 | TGTTGATACAACCATAAAATGATAATTACACCCAT | YNHKMIITPIN (SEQ ID NO: 5352) * *LSHP (SEQ ID |
| | AAATTGATAATTATCACACCCA | NO: 5353) |
| 22 | TGTCGATACAACCATAAAATGATAATTACACCCAT | CRYNHKMIITPIN (SEQ ID NO: 5361)* *LSHP (SEQ |
| | AAATTGATAATTATCACACCCA | DD NO: 5353) |
| 23 | TGTGGATACAACCATAAAATGATAATTACACCCAT | CGYNHKMIITPIN(SEQ ID NO: 5362)* *LSHP (SEQ |
| | AAATTGATAATTATCACACCCA | ID NO: 5353) |
| 24 | TGTTCATACAACCATAAAATGATAATTACACCCAT | CSYNHKMIITPIN(SEQ ID NO: 5363)* *LSHP (SEQ |
| | AAATTGATAATTATCACACCCA | ID NO: 5353) |
| 25 | TGTTGATACAACCATAAAATGATAATTACACCCAT | C*YNHKMIITPING(SEQ ID NO: 5364)* LSHP (SEQ |
| | AAATGGATAATTATCACACCCA | ID NO: 5353) |
| 26 | TGTTGATACAACCATAAAATGATAATTACACCCAT | C*YNHKMIITPINS(SEQ ID NO: 5365)* LSHP (SEQ |
| | AAATTCATAATTATCACACCCA | ID NO: 5353) |
| 27 | TGTCGATACAACCATAAAATGATAATTACACCCAT | CRYNHKMIITPING(SEQ ID NO: 5366)* LSHP (SEQ |
| | AAATGGATAATTATCACACCCA | ID NO: 5353) |
| 28 | TGTCGATACAACCATAAAATGATAATTACACCCAT | CRYNHKMIITPINS(SEQ ID NO: 5367)* LSHP (SEQ |
| | AAATTCATAATTATCACACCCA | ID NO: 5353) |
| 29 | TGTGGATACAACCATAAAATGATAATTACACCCAT | CGYNHKMIITPING(SEQ ID NO: 5368) * LSHP |
| | AAATGGATAATTATCACACCCA | (SEQ ID NO: 5353) |
| 30 | TGTGGATACAACCATAAAATGATAATTACACCCAT | CGYNHKMIITPINS(SEQ ID NO: 5369) * LSHP (SEQ |
| | AAATTCATAATTATCACACCCA | ID NO: 5353) |
| 31 | TGTTCATACAACCATAAAATGATAATTACACCCAT | CSYNHKMIITPING(SEQ ID NO: 5370) * LSHP (SEQ |
| | AAATGGATAATTATCACACCCA | ID NO: 5353) |
| 32 | TGTTCATACAACCATAAAATGATAATTACACCCAT | CSYNHKMIITPINS(SEQ ID NO: 5371) * LSHP (SEQ |
| | AAATTCATAATTATCACACCCA | DD NO: 5353) |
| 33 | TGTTGATACAACCATAAAATGATAATTACACCCAT | C*YNHKMIITPIN (SEQ ID NO: 5352) *SLSHP (SEQ |
| | AAATTGATCATTATCACACCCA | ID NO: 5372) |
| 34 | TGTCGATACAACCATAAAATGATAATTACACCCAT | CRYNHKMIITPIN(SEQ ID NO: 5361) * SLSHP (SEQ |
| | AAATTGATCATTATCACACCCA | ID NO: 5372) |
| 35 | TGTGGATACAACCATAAAATGATAATTACACCCAT | CGYNHKMIITPIN(SEQ ID NO: 5362) * SLSHP (SEQ |
| | AAATTGATCATTATCACACCCA | ID NO: 5372) |
| 36 | TGTTCATACAACCATAAAATGATAATTACACCCAT | CSYNHKMIITPIN(SEQ ID NO: 5363) * SLSHP (SEQ |
| | AAATTGATCATTATCACACCCA | ID NO: 5372) |
| 37 | TGTTGATACAACCATAAAATGATAATTACACCCAT | C*YNHKMIITPINGSLSHP (SEQ ID NO: 5373) |
| | AAATGGATCATTATCACACCCA | |
| 38 | TGTTGATACAACCATAAAATGATAATTACACCCAT | C*YNHKMITPINSSLSHP (SEQ ID NO: 5374) |
| | AAATTCATCATTATCACACCCA | |
| 39 | TGTCGATACAACCATAAAATGATAATTACACCCAT | CRYNHKMITPINGSLSHP (SEQ ID NO: 5375) |
| | AAATGGATCATTATCACACCCA | |
| 40 | TGTCGATACAACCATAAAATGATAATTACACCCAT | CRYNHKMIITPINSSLSHP (SEQ ID NO: 5376) |
| | AAATTCATCATTATCACACCCA | |
| 41 | TGTGGATACAACCATAAAATGATAATTACACCCAT | CGYNHKMIITPINGSLSHP (SEQ ID NO: 5377) |
| | AAATGGATCATTATCACACCCA | |
| 42 | TGTGGATACAACCATAAAATGATAATTACACCCAT | CGYNHKMIITPINSSLSHP (SEQ ID NO: 5378) |
| | AAATTCATCATTATCACACCCA | |
| 43 | TGTTCATACAACCATAAAATGATAATTACACCCAT | CSYNHKMITPINGSLSHP (SEQ ID NO: 5379) |
| | AAATGGATCATTATCACACCCA | |
| 44 | TGTTCATACAACCATAAAATGATAATTACACCCAT | CSYNHKMIITPINSSLSHP (SEQ ID NO: 5380) |
| | AAATTCATCATTATCACACCCA | |
| 45 | GGTTGATACAACCATAAAATGATAATTACACCCAT | G*YNHKMIITPIN (SEQ ID NO: 5352)**LSHP (SEQ |
| | AAATTGATAATTATCACACCCA | ID NO: 5353) |
| 46 | GGTCGATACAACCATAAAATGATAATTACACCCAT | GRYNHKMIITPIN (SEQ ID NO: 5381) * *LSHP |
| | AAATTGATAATTATCACACCCA | (SEQ ID NO: 5353) |
| 47 | GGTGGATACAACCATAAAATGATAATTACACCCAT | GGYNHKMIITPIN (SEQ ID NO: 5382) * *LSHP |
| | AAATTGATAATTATCACACCCA | (SEQ ID NO: 5353) |
| 48 | GGTTCATACAACCATAAAATGATAATTACACCCAT | GSYNHKMIITPIN (SEQ ID NO: 5383) **LSHP (SEQ |
| | AAATTGATAATTATCACACCCA | ID NO: 5353) |
| 49 | GGTTGATACAACCATAAAATGATAATTACACCCAT | G*YNHKMIITPING(SEQ ID NO: 5364) * LSHP (SEQ |
| | AAATGGATAATTATCACACCCA | ID NO: 5353) |
| 50 | GGTTGATACAACCATAAAATGATAATTACACCCAT | G*YNHKMIITPINS(SEQ ID NO: 5365) * LSHP (SEQ |
| | AAATTCATAATTATCACACCCA | ID NO: 5353) |
| 51 | GGTCGATACAACCATAAAATGATAATTACACCCAT | GRYNHKMIITPING (SEQ ID NO: 5385) *LSHP |
| | AAATGGATAATTATCACACCCA | (SEQ ID NO: 5353) |
| 52 | GGTCGATACAACCATAAAATGATAATTACACCCAT | GRYNHKMIITPINS (SEQ ID NO: 5384) *LSHP (SEQ |
| | AAATTCATAATTATCACACCCA | ID NO: 5353) |
| 53 | GGTGGATACAACCATAAAATGATAATTACACCCAT | GGYNHKMIITPING (SEQ ID NO: 5387) *LSHP |
| | AAATGGATAATTATCACACCCA | (SEQ ID NO: 5353) |
| 54 | GGTGGATACAACCATAAAATGATAATTACACCCAT | GGYNHKMIITPINS(SEQ ID NO: 5388) *LSHP (SEQ |
| | AAATTCATAATTATCACACCCA | ID NO: 5353) |
| 55 | GGTTCATACAACCATAAAATGATAATTACACCCAT | GSYNHKMIITPING (SEQ ID NO: 5389) *LSHP (SEQ |
| | AAATGGATAATTATCACACCCA | ID NO: 5353) |
| 56 | GGTTCATACAACCATAAAATGATAATTACACCCAT | GSYNHKMIITPINS(SEQ ID NO: 5390) *LSHP (SEQ |
| | AAATTCATAATTATCACACCCA | ID NO: 5353) |
| 57 | GGTTGATACAACCATAAAATGATAATTACACCCAT | G*YNHKMIITPIN (SEQ ID NO: 5352)*SLSHP (SEQ |
| | AAATTGATCATTATCACACCCA | ID NO: 5372) |
| 58 | GGTCGATACAACCATAAAATGATAATTACACCCAT | GRYNHKMIITPIN (SEQ ID NO: 5381) * SLSHP |
| | AAATTGATCATTATCACACCCA | (SEQ ID NO: 5372) |
| 59 | GGTGGATACAACCATAAAATGATAATTACACCCAT | GGYNHKMIITPIN (SEQ ID NO: 5382) * SLSHP |
| | AAATTGATCATTATCACACCCA | (SEQ ID NO: 5372) |
| 60 | GGTTCATACAACCATAAAATGATAATTACACCCAT | GSYNHKMIITPIN (SEQ ID NO: 5383) *SLSHP (SEQ |
| | AAATTGATCATTATCACACCCA | ID NO: 5372) |
| 61 | GGTTGATACAACCATAAAATGATAATTACACCCAT | G*YNHKMIITPINGSLSHP (SEQ ID NO: 5373) |
| | AAATGGATCATTATCACACCCA | |
| 62 | GGTTGATACAACCATAAAATGATAATTACACCCAT | G*YNHKMIITPINSSLSHP (SBQ ID NO: 5374) |
| | AAATTCATCATTATCACACCCA | |
| 63 | GGTCGATACAACCATAAAATGATAATTACACCCAT | GRYNHKMIITPINGSLSHP (SEQ ID NO: 5391) |
| | AAATGGATCATTATCACACCCA | |
| 64 | GGTCGATACAACCATAAAATGATAATTACACCCAT | GRYNHKMIITPINSSLSHP (SEQ ID NO: 5392) |
| | AAATTCATCATTATCACACCCA | |
| 65 | GGTGGATACAACCATAAAATGATAATTACACCCAT | GGYNHKMIITPINGSLSHP (SEQ ID NO: 5393) |
| | AAATGGATCATTATCACACCCA | |
| 66 | GGTGGATACAACCATAAAATGATAATTACACCCAT | GGYNHKMIITPINSSLSHP (SEQ ID NO: 5394) |
| | AAATTCATCATTATCACACCCA | |
| 67 | GGTTCATACAACCATAAAATGATAATTACACCCAT | GSYNHKMIITPINGSLSHP (SEQ ID NO: 5395) |
| | AAATGGATCATTATCACACCCA | |
| 68 | GGTTCATACAACCATAAAATGATAATTACACCCAT | GSYNHKMIITPINSSLSHP (SEQ ID NO: 5396) |
| | AAATTCATCATTATCACACCCA | |
| 69 | TCTTGATACAACCATAAAATGATAATTACACCCAT | S*YNHKMIITPIN (SEQ ID NO: 5352)**LSHP (SEQ |
| | AAATTGATAATTATCACACCCA | ID NO: 5353) |
| 70 | TCTCGATACAACCATAAAATGATAATTACACCCAT | SRYNHKMIITPIN (SEQ ID NO: 5397) **LSHP (SEQ |
| | AAATTGATAATTATCACACCCA | ID NO: 5353) |
| 71 | TCTGGATACAACCATAAAATGATAATTACACCCAT | SGYNHKMIITPIN (SEQ ID NO: 5398) **LSHP (SEQ |
| | AAATTGATAATTATCACACCCA | ID NO: 5353) |
| 72 | TCTTCATACAACCATAAAATGATAATTACACCCAT | SSYNHKMIITPIN (SEQ ID NO: 5399) **LSHP (SEQ |
| | AAATTGATAATTATCACACCCA | ID NO: 5353) |
| 73 | TCTTGATACAACCATAAAATGATAATTACACCCAT | S*YNHKMIITPING(SEQ ID NO: 5364) * LSHP (SEQ |
| | AAATGGATAATTATCACACCCA | ID NO: 5353) |
| 74 | TCTTGATACAACCATAAAATGATAATTACACCCAT | S*YNHKMIITPINS(SEQ ID NO: 5365) ** LSHP |
| | AAATTCATAATTATCACACCCA | (SEQ ID NO: 5353) |
| 75 | TCTCGATACAACCATAAAATGATAATTACACCCAT | SRYNHKMITPING (SEQ ID NO: 5400) *LSHP (SEQ |
| | AAATGGATAATTATCACACCCA | ID NO: 5353) |
| 76 | TCTCGATACAACCATAAAATGATAATTACACCCAT | SRYNHKMIITPINS (SEQ ID NO: 5401) *LSHP (SEQ |
| | AAATTCATAATTATCACACCCA | ID NO: 5353) |
| 77 | TCTGGATACAACCATAAAATGATAATTACACCCAT | SGYNHKMITPING (SEQ ID NO: 5402) *LSHP (SEQ |
| | AAATGGATAATTATCACACCCA | ID NO: 5353) |
| 78 | TCTGGATACAACCATAAAATGATAATTACACCCAT | SGYNHKMIITPINS (SEQ ID NO: 5403) *LSHP (SEQ |
| | AAATTCATAATTATCACACCCA | ID NO: 5353) |
| 79 | TCTTCATACAACCATAAAATGATAATTACACCCAT | SSYNHKMIITPING (SEQ ID NO: 5404) *LSHP (SEQ |
| | AAATGGATAATTATCACACCCA | ID NO: 5353) |
| 80 | TCTTCATACAACCATAAAATGATAATTACACCCAT | SSYNHKMIITPINS (SEQ ID NO: 5405) *LSHP (SEQ |
| | AAATTCATAATTATCACACCCA | ID NO: 5353) |
| 81 | TCTTGATACAACCATAAAATGATAATTACACCCAT | S*YNHKMIITPIN (SEQ ID NO: 5352)*SLSHP (SEQ |
| | AAATTGATCATTATCACACCCA | ID NO: 5372) |
| 82 | TCTCGATACAACCATAAAATGATAATTACACCCAT | SRYNHKMIITPIN (SEQ ID NO: 5397) *SLSHP (SEQ |
| | AAATTGATCATTATCACACCCA | ID NO: 5372) |
| 83 | TCTGGATACAACCATAAAATGATAATTACACCCAT | SGYNHKMIITPIN (SEQ ID NO: 5398) *SLSHP (SEQ |
| | AAATTGATCATTATCACACCCA | ID NO: 5372) |
| 84 | TCTTCATACAACCATAAAATGATAATTACACCCAT | SSYNHKMIITPIN (SEQ ID NO: 5399) *SLSHP (SEQ |
| | AAATTGATCATTATCACACCCA | ID NO: 5372) |
| 85 | TCTTGATACAACCATAAAATGATAATTACACCCAT | S*YNHKMIITPINGSLSHP (SEQ ID NO: 5373) |
| | AAATGGATCATTATCACACCCA | |
| 86 | TCTTGATACAACCATAAAATGATAATTACACCCAT | S*YNHKMIITPINSSLSHP (SEQ ID NO: 5374) |
| | AAATTCATCATTATCACACCCA | |
| 87 | TCTCGATACAACCATAAAATGATAATTACACCCAT | SRYNHKMIITPINGSLSHP (SEQ ID NO: 5406) |
| | AAATGGATCATTATCACACCCA | |
| 88 | TCTCGATACAACCATAAAATGATAATTACACCCAT | SRYNHKMITPINSSLSHP (SEQ ID NO: 5407) |
| | AAATTCATCATTATCACACCCA | |
| 89 | TCTGGATACAACCATAAAATGATAATTACACCCAT | SGYNHKMIITPINGSLSHP (SEQ ID NO: 5408) |
| | AAATGGATCATTATCACACCCA | |
| 90 | TCTGGATACAACCATAAAATGATAATTACACCCAT | SGYNHKMIITPINSSLSHP (SEQ ID NO: 5409) |
| | AAATTCATCATTATCACACCCA | |
| 91 | TCTTCATACAACCATAAAATGATAATTACACCCAT | SSYNHKMIITPINGSLSHP (SEQ ID NO: 5410) |
| | AAATGGATCATTATCACACCCA | |
| 92 | TCTTCATACAACCATAAAATGATAATTACACCCAT | SSYNHKMIITPINSSLSHP (SEQ ID NO: 5411) |
| | AAATTCATCATTATCACACCCA | |
| 93 | AGTTGATACAACCATAAAATGATAATTACACCCAT | S*YNHKMIITPIN (SEQ ID NO: 5352) ** LSHP (SEQ |
| | AAATTGATAATTATCACACCCA | ID NO: 5353) |
| 94 | AGTCGATACAACCATAAAATGATAATTACACCCAT | SRYNHKMIITPIN (SEQ ID NO: 5397) ** LSHP (SEQ |
| | AAATTGATAATTATCACACCCA | ID NO: 5353) |
| 95 | AGTGGATACAACCATAAAATGATAATTACACCCAT | SGYNHKMIITPIN (SEQ ID NO: 5398) ** LSHP (SEQ |
| | AAATTGATAATTATCACACCCA | ID NO: 5353) |
| 96 | AGTTCATACAACCATAAAATGATAATTACACCCAT | SSYNHKMIITPIN (SEQ ID NO: 5399) **LSHP (SEQ |
| | AAATTGATAATTATCACACCCA | ID NO: 5353) |
| 97 | AGTTGATACAACCATAAAATGATAATTACACCCAT | S*YNHKMIITPING(SEQ ID NO: 5364) * LSHP (SEQ |
| | AAATGGATAATTATCACACCCA | ID NO: 5353) |
| 98 | AGTTGATACAACCATAAAATGATAATTACACCCAT | S*YNHKMIITPINS(SEQ ID NO: 5365) * LSHP (SEQ |
| | AAATTCATAATTATCACACCCA | ID NO: 5353) |
| 99 | AGTCGATACAACCATAAAATGATAATTACACCCAT | SRYNHKMIITPING (SEQ ID NO: 5400) *LSHP (SEQ |
| | AAATGGATAATTATCACACCCA | ID NO: 5353) |
| 100 | AGTCGATACAACCATAAAATGATAATTACACCCAT | SRYNHKMIITPINS (SEQ ID NO: 5401) *LSHP (SEQ |
| | AAATTCATAATTATCACACCCA | ID NO: 5353) |
| 101 | AGTGGATACAACCATAAAATGATAATTACACCCAT | SGYNHKMIITPING (SEQ ID NO: 5402) *LSHP (SEQ |
| | AAATGGATAATTATCACACCCA | ID NO: 5353) |
| 102 | AGTGGATACAACCATAAAATGATAATTACACCCAT | SGYNHKMIITPINS (SEQ ID NO: 5403) *LSHP (SEQ |
| | AAATTCATAATTATCACACCCA | ID NO: 5353) |
| 103 | AGTTCATACAACCATAAAATGATAATTACACCCAT | SSYNHKMIITPING (SEQ ID NO: 5404) *LSHP (SEQ |
| | AAATGGATAATTATCACACCCA | ID NO: 5353) |
| 104 | AGTTCATACAACCATAAAATGATAATTACACCCAT | SSYNHKMIITPINS (SEQ ID NO: 5405) *LSHP (SEQ |
| | AAATTCATAATTATCACACCCA | ID NO: 5353) |
| 105 | AGTTGATACAACCATAAAATGATAATTACACCCAT | S*YNHKMIITPIN (SEQ ID NO: 5352)*SLSHP (SEQ |
| | AAATTGATCATTATCACACCCA | ID NO: 5372) |
| 106 | AGTCGATACAACCATAAAATGATAATTACACCCAT | SRYNHKMIITPIN (SEQ ID NO: 5397)*SLSHP (SEQ |
| | AAATTGATCATTATCACACCCA | ID NO: 5372) |
| 107 | AGTGGATACAACCATAAAATGATAATTACACCCAT | SGYNHKMIITPIN (SEQ ID NO: 5398) *SLSHP (SEQ |
| | AAATTGATCATTATCACACCCA | ID NO: 5372) |
| 108 | AGTTCATACAACCATAAAATGATAATTACACCCAT | SSYNHKMIITPIN (SBQ ID NO: 5399) *SLSHP (SEQ |
| | AAATTGATCATTATCACACCCA | ID NO: 5372) |
| 109 | AGTTGATACAACCATAAAATGATAATTACACCCAT | S*YNHKMIITPINGSLSHP (SEQ ID NO: 5373) |
| | AAATGGATCATTATCACACCCA | |
| 110 | AGTTGATACAACCATAAAATGATAATTACACCCAT | S*YNHKMIITPINSSLSHP (SEQ ID NO: 5374) |
| | AAATTCATCATTATCACACCCA | |
| 111 | AGTCGATACAACCATAAAATGATAATTACACCCAT | SRYNHKMIITPINGSLSHP (SEQ ID NO: 5406) |
| | AAATGGATCATTATCACACCCA | |
| 112 | AGTCGATACAACCATAAAATGATAATTACACCCAT | SRYNHKMITPINSSLSHP (SEQ ID NO: 5407) |
| | AAATTCATCATTATCACACCCA | |
| 113 | AGTGGATACAACCATAAAATGATAATTACACCCAT | SGYNHKMIITPINGSLSHP (SEQ ID NO: 5408) |
| | AAATGGATCATTATCACACCCA | |
| 114 | AGTGGATACAACCATAAAATGATAATTACACCCAT | SGYNHKMIITPINSSLSHP (SEQ ID NO: 5409) |
| | AAATTCATCATTATCACACCCA | |
| 115 | AGTTCATACAACCATAAAATGATAATTACACCCAT | SSYNHKMIITPINGSLSHP (SEQ ID NO: 5410) |
| | AAATGGATCATTATCACACCCA | |
| 116 | AGTTCATACAACCATAAAATGATAATTACACCCAT | SSYNHKMIITPINSSLSHP (SEQ ID NO: 5411) |
| | AAATTCATCATTATCACACCCA | |
| 117 | TGTTGATACAACCCTAAAATGATAATTACACCCAT | C*YNPKMIITPIN (SEQ ID NO: 5412) **LSHP (SEQ |
| | AAATTGATAATTATCACACCCA | ID NO: 5353) |
| 118 | TGTCGATACAACCCTAAAATGATAATTACACCCAT | CRYNPKMIITPIN (SEQ ID NO: 5413) **LSHP (SEQ |
| | AAATTGATAATTATCACACCCA | ID NO: 5353) |
| 119 | TGTGGATACAACCCTAAAATGATAATTACACCCAT | CGYNPKMITPIN (SEQ ID NO: 5414) **LSHP (SEQ |
| | AAATTGATAATTATCACACCCA | ID NO: 5353) |
| 120 | TGTTCATACAACCCTAAAATGATAATTACACCCAT | CSYNPKMIITPIN (SEQ ID NO: 5415) **LSHP (SEQ |
| | AAATTGATAATTATCACACCCA | ID NO: 5353) |
| 121 | TGTTGATACAACCCTAAAATGATAATTACACCCAT | C*YNPKMIITPING (SEQ ID NO: 5416) *LSHP (SEQ |
| | AAATGGATAATTATCACACCCA | ID NO: 5353) |
| 122 | TGTTGATACAACCCTAAAATGATAATTACACCCAT | C*YNPKMIITPINS (SEQ ID NO: 5417) *LSHP (SEQ |
| | AAATTCATAATTATCACACCCA | ID NO: 5353) |
| 123 | TGTCGATACAACCCTAAAATGATAATTACACCCAT | CRYNPKMIITPING (SEQ ID NO: 5418) *LSHP (SEQ |
| | AAATGGATAATTATCACACCCA | ID NO: 5353) |
| 124 | TGTCGATACAACCCTAAAATGATAATTACACCCAT | CRYNPKMIITPINS (SEQ ID NO: 5419) *LSHP (SEQ |
| | AAATTCATAATTATCACACCCA | ID NO: 5353) |
| 125 | TGTGGATACAACCCTAAAATGATAATTACACCCAT | CGYNPKMIITPING (SEQ ID NO: 5420) *LSHP (SEQ |
| | AAATGGATAATTATCACACCCA | ID NO: 5353) |
| 126 | TGTGGATACAACCCTAAAATGATAATTACACCCAT | CGYNPKMIITPINS (SEQ ID NO: 5421) *LSHP (SEQ |
| | AAATTCATAATTATCACACCCA | ID NO: 5353) |
| 127 | TGTTCATACAACCCTAAAATGATAATTACACCCAT | CSYNPKMIITPING (SEQ ID NO: 5422) *LSHP (SEQ |
| | AAATGGATAATTATCACACCCA | ID NO: 5353) |
| 128 | TGTTCATACAACCCTAAAATGATAATTACACCCAT | CSYNPKMIITPINS (SEQ ID NO: 5423) *LSHP (SEQ |
| | AAATTCATAATTATCACACCCA | ID NO: 5353) |
| 129 | TGTTGATACAACCCTAAAATGATAATTACACCCAT | C*YNPKMIITPIN (SEQ ID NO: 5412) *SLSHP (SEQ |
| | AAATTGATCATTATCACACCCA | ID NO: 5372) |
| 130 | TGTCGATACAACCCTAAAATGATAATTACACCCAT | CRYNPKMIITPIN (SEQ ID NO: 5413) *SLSHP (SEQ |
| | AAATTGATCATTATCACACCCA | ID NO: 5372) |
| 131 | TGTGGATACAACCCTAAAATGATAATTACACCCAT | CGYNPKMIITPIN (SEQ ID NO: 5414) *SLSHP (SEQ |
| | AAATTGATCATTATCACACCCA | ID NO: 5372) |
| 132 | TGTTCATACAACCCTAAAATGATAATTACACCCAT | CSYNPKMITPIN (SEQ ID NO: 5415) *SLSHP (SEQ |
| | AAATTGATCATTATCACACCCA | ID NO: 5372) |
| 133 | TGTTGATACAACCCTAAAATGATAATTACACCCAT | C*YNPKMITPINGSLSHP (SEQ ID NO: 5424) |
| | AAATGGATCATTATCACACCCA | |
| 134 | TGTTGATACAACCCTAAAATGATAATTACACCCAT | C*YNPKMIITPINSSLSHP (SEQ ID NO: 5425) |
| | AAATTCATCATTATCACACCCA | |
| 135 | TGTCGATACAACCCTAAAATGATAATTACACCCAT | CRYNPKMIITPINGSLSHP (SEQ ID NO: 5426) |
| | AAATGGATCATTATCACACCCA | |
| 136 | TGTCGATACAACCCTAAAATGATAATTACACCCAT | CRYNPKMIITPINSSLSHP (SEQ ID NO: 5427) |
| | AAATTCATCATTATCACACCCA | |
| 137 | TGTGGATACAACCCTAAAATGATAATTACACCCAT | CGYNPKMITPINGSLSHP (SEQ ID NO: 5428) |
| | AAATGGATCATTATCACACCCA | |
| 138 | TGTGGATACAACCCTAAAATGATAATTACACCCAT | CGYNPKMIITPINSSLSHP (SEQ ID NO: 5429) |
| | AAATTCATCATTATCACACCCA | |
| 139 | TGTTCATACAACCCTAAAATGATAATTACACCCAT | CSYNPKMIITPINGSLSHP (SEQ ID NO: 5430) |
| | AAATGGATCATTATCACACCCA | |
| 140 | TGTTCATACAACCCTAAAATGATAATTACACCCAT | CSYNPKMIITPINSSLSHP (SEQ ID NO: 5431) |
| | AAATTCATCATTATCACACCCA | |
| 141 | TGTTGATACAACCATAAAATGATAATTACACCCAT | C*YNHKMIITPIN (SEQ ID NO: 5352)**LSPP (SEQ |
| | AAATTGATAATTATCACCCCCA | ID NO: 5432) |
| 142 | TGTCGATACAACCATAAAATGATAATTACACCCAT | CRYNHKMIITPIN(SEQ ID) NO: 5361) * *LSPP (SEQ |
| | AAATTGATAATTATCACCCCCA | ID NO: 5432) |
| 143 | TGTGGATACAACCATAAAATGATAATTACACCCAT | CGYNHKMIITPIN(SEQ ID NO: 5362) * *LSPP (SEQ |
| | AAATTGATAATTATCACCCCCA | ID NO: 5432) |
| 144 | TGTTCATACAACCATAAAATGATAATTACACCCAT | CSYNHKMIITPIN(SEQ ID NO: 5363) * *LSPP (SEQ |
| | AAATTGATAATTATCACCCCCA | ID NO: 5432) |
| 145 | TGTTGATACAACCATAAAATGATAATTACACCCAT | C*YNHKMIITPING(SEQ ID NO: 5364) * LSPP (SEQ |
| | AAATGGATAATTATCACCCCCA | DD NO: 5432) |
| 146 | TGTTGATACAACCATAAAATGATAATTACACCCAT | C*YNHKMIITPINS(SEQ ID NO: 5365) * LSPP (SEQ |
| | AAATTCATAATTATCACCCCCA | ID NO: 5432) |
| 147 | TGTCGATACAACCATAAAATGATAATTACACCCAT | CRYNHKMIITPING(SEQ ID NO: 5366) * LSPP (SEQ |
| | AAATGGATAATTATCACCCCCA | ID NO: 5432) |
| 148 | TGTCGATACAACCATAAAATGATAATTACACCCAT | CRYNHKMIITPINS(SEQ ID NO: 5367) * LSPP (SEQ |
| | AAATTCATAATTATCACCCCCA | ID NO: 5432) |
| 149 | TGTGGATACAACCATAAAATGATAATTACACCCAT | CGYNHKMIITPING(SEQ ID NO: 5368) * LSPP (SEQ |
| | AAATGGATAATTATCACCCCCA | ID NO: 5432) |
| 150 | TGTGGATACAACCATAAAATGATAATTACACCCAT | CGYNHKMIITPINS(SEQ ID NO: 5369) * LSPP (SEQ |
| | AAATTCATAATTATCACCCCCA | ID NO: 5432) |
| 151 | TGTTCATACAACCATAAAATGATAATTACACCCAT | CSYNHKMIITPING(SBQ ID NO: 5370) * LSPP (SEQ |
| | AAATGGATAATTATCACCCCCA | ID NO: 5432) |
| 152 | TGTTCATACAACCATAAAATGATAATTACACCCAT | CSYNHKMIITPINS(SEQ ID NO: 5371) * LSPP (SEQ |
| | AAATTCATAATTATCACCCCCA | ID NO: 5432) |
| 153 | TGTTGATACAACCATAAAATGATAATTACACCCAT | C*YNHKMIITPIN (SEQ ID NO: 5352)*SLSPP (SEQ |
| | AAATTGATCATTATCACCCCCA | ID NO: 5433) |
| 154 | TGTCGATACAACCATAAAATGATAATTACACCCAT | CRYNHKMIITPIN(SEQ ID NO: 5361) * SLSPP (SEQ |
| | AAATTGATCATTATCACCCCCA | ID NO: 5433) |
| 155 | TGTGGATACAACCATAAAATGATAATTACACCCAT | CGYNHKMIITPIN(SEQ ID NO: 5362) * SLSPP (SEQ |
| | AAATTGATCATTATCACCCCCA | ID NO: 5433) |
| 156 | TGTTCATACAACCATAAAATGATAATTACACCCAT | CSYNHKMIITPIN(SEQ ID NO: 5363) * SLSPP (SEQ |
| | AAATTGATCATTATCACCCCCA | ID NO: 5433) |
| 157 | TGTTGATACAACCATAAAATGATAATTACACCCAT | C*YNHKMIITPINGSLSPP (SEQ ID NO: 5434) |
| | AAATGGATCATTATCACCCCCA | |
| 158 | TGTTGATACAACCATAAAATGATAATTACACCCAT | C*YNHKMIITPINSSLSPP (SEQ ID NO: 5435) |
| | AAATTCATCATTATCACCCCCA | |
| 159 | TGTCGATACAACCATAAAATGATAATTACACCCAT | CRYNHKMIITPINGSLSPP (SEQ ID NO: 5436) |
| | AAATGGATCATTATCACCCCCA | |
| 160 | TGTCGATACAACCATAAAATGATAATTACACCCAT | CRYNHKMIITPINSSLSPP (SEQ ID NO: 5437) |
| | AAATTCATCATTATCACCCCCA | |
| 161 | TGTGGATACAACCATAAAATGATAATTACACCCAT | CGYNHKMIITPINGSLSPP (SEQ ID NO: 5354) |
| | AAATGGATCATTATCACCCCCA | |
| 162 | TGTGGATACAACCATAAAATGATAATTACACCCAT | CGYNHKMIITPINSSLSPP (SEQ ID NO: 5438) |
| | AAATTCATCATTATCACCCCCA | |
| 163 | TGTTCATACAACCATAAAATGATAATTACACCCAT | CSYNHKMIITPINGSLSPP (SEQ ID NO: 5439) |
| | AAATGGATCATTATCACCCCCA | |
| 164 | TGTTCATACAACCATAAAATGATAATTACACCCAT | CSYNHKMIITPINSSLSPP (SEQ ID NO: 5440) |
| | AAATTCATCATTATCACCCCCA | |
| 165 | TGTTGATACAACCCTAAAATGATAATTACACCCAT | C*YNPKMIITPIN (SEQ ID NO: 5412) **LSPP (SEQ |
| | AAATTGATAATTATCACCCCCA | ID NO: 5432) |
| 166 | TGTCGATACAACCCTAAAATGATAATTACACCCAT | CRYNPKMIITPIN (SEQ ID NO: 5413) **LSPP (SEQ |
| | AAATTGATAATTATCACCCCCA | ID NO: 5432) |
| 167 | TGTGGATACAACCCTAAAATGATAATTACACCCAT | CGYNPKMIITPIN (SEQ ID NO: 5414) **LSPP (SEQ |
| | AAATTGATAATTATCACCCCCA | ID NO: 5432) |
| 168 | TGTTCATACAACCCTAAAATGATAATTACACCCAT | CSYNPKMIITPIN (SEQ ID NO: 5415) **LSPP (SEQ |
| | AAATTGATAATTATCACCCCCA | ID NO: 5432) |
| 169 | TGTTGATACAACCCTAAAATGATAATTACACCCAT | C*YNPKMIITPING (SEQ ID NO: 5416) *LSPP (SEQ |
| | AAATGGATAATTATCACCCCCA | ID NO: 5432) |
| 170 | TGTTGATACAACCCTAAAATGATAATTACACCCAT | C*YNPKMIITPINS (SEQ ID NO: 5417) *LSPP (SEQ |
| | AAATTCATAATTATCACCCCCA | ID NO: 5432) |
| 171 | TGTCGATACAACCCTAAAATGATAATTACACCCAT | CRYNPKMIITPING (SEQ ID NO: 5418) *LSPP (SEQ |
| | AAATGGATAATTATCACCCCCA | ID NO: 5432) |
| 172 | TGTCGATACAACCCTAAAATGATAATTACACCCAT | CRYNPKMIITPINS (SEQ ID NO: 5419) *LSPP (SEQ |
| | AAATTCATAATTATCACCCCCA | ID NO: 5432) |
| 173 | TGTGGATACAACCCTAAAATGATAATTACACCCAT | CGYNPKMIITPING (SEQ ID NO: 5420) *LSPP (SEQ |
| | AAATGGATAATTATCACCCCCA | ID NO: 5432) |
| 174 | TGTGGATACAACCCTAAAATGATAATTACACCCAT | CGYNPKMIITPINS (SEQ ID NO: 5421) *LSPP (SEQ |
| | AAATTCATAATTATCACCCCCA | ID NO: 5432) |
| 175 | TGTTCATACAACCCTAAAATGATAATTACACCCAT | CSYNPKMITPING (SEQ ID NO: 5422) *LSPP (SEQ |
| | AAATGGATAATTATCACCCCCA | ID NO: 5432) |
| 176 | TGTTCATACAACCCTAAAATGATAATTACACCCAT | CSYNPKMIITPINS (SEQ ID NO: 5423) *LSPP (SEQ |
| | AAATTCATAATTATCACCCCCA | ID NO: 5432) |
| 177 | TGTTGATACAACCCTAAAATGATAATTACACCCAT | C*YNPKMIITPIN (SEQ ID NO: 5412) *SLSPP (SEQ |
| | AAATTGATCATTATCACCCCCA | ID NO: 5433) |
| 178 | TGTCGATACAACCCTAAAATGATAATTACACCCAT | CRYNPKMIITPIN (SEQ ID NO: 5413) *SLSPP (SEQ |
| | AAATTGATCATTATCACCCCCA | ID NO: 5433) |
| 179 | TGTGGATACAACCCTAAAATGATAATTACACCCAT | CGYNPKMIITPIN (SEQ ID NO: 5414) *SLSPP (SEQ |
| | AAATTGATCATTATCACCCCCA | ID NO: 5433) |
| 180 | TGTTCATACAACCCTAAAATGATAATTACACCCAT | CSYNPKMIITPIN (SEQ ID NO: 5415) *SLSPP (SEQ |
| | AAATTGATCATTATCACCCCCA | ID NO: 5433) |
| 181 | TGTTGATACAACCCTAAAATGATAATTACACCCAT | C*YNPKMIITPINGSLSPP (SEQ ID NO: 5441) |
| | AAATGGATCATTATCACCCCCA | |
| 182 | TGTTGATACAACCCTAAAATGATAATTACACCCAT | C*YNPKMIITPINSSLSPP (SEQ ID NO: 5442) |
| | AAATTCATCATTATCACCCCCA | |
| 183 | TGTCGATACAACCCTAAAATGATAATTACACCCAT | CRYNPKMIITPINGSLSPP (SEQ ID NO: 5443) |
| | AAATGGATCATTATCACCCCCA | |
| 184 | TGTCGATACAACCCTAAAATGATAATTACACCCAT | CRYNPKMITPINSSLSPP (SEQ ID NO: 5444) |
| | AAATTCATCATTATCACCCCCA | |
| 185 | TGTGGATACAACCCTAAAATGATAATTACACCCAT | CGYNPKMIITPINGSLSPP (SEQ ID NO: 5445) |
| | AAATGGATCATTATCACCCCCA | |
| 186 | TGTGGATACAACCCTAAAATGATAATTACACCCAT | CGYNPKMIITPINSSLSPP (SEQ ID NO: 5446) |
| | AAATTCATCATTATCACCCCCA | |
| 187 | TGTTCATACAACCCTAAAATGATAATTACACCCAT | CSYNPKMIITPINGSLSPP (SEQ ID NO: 5447) |
| | AAATGGATCATTATCACCCCCA | |
| 188 | TGTTCATACAACCCTAAAATGATAATTACACCCAT | CSYNPKMIITPINSSLSPP (SEQ ID NO: 5448) |
| | AAATTCATCATTATCACCCCCA | |
| 189 | TGTTGATACAACCATAAAACGATAATTACACCCAT | C*YNHKTIITPIN (SEQ ID NO: 5449) **LSHP (SEQ |
| | AAATTGATAATTATCACACCCA | ID NO: 5353) |
| 190 | TGTCGATACAACCATAAAACGATAATTACACCCAT | CRYNHKTIITPIN (SEQ ID NO: 5450) **LSHP (SEQ |
| | AAATTGATAATTATCACACCCA | ID NO: 5353) |
| 191 | TGTGGATACAACCATAAAACGATAATTACACCCAT | CGYNHKTIITPIN (SEQ ID NO: 5451) **LSHP (SEQ |
| | AAATTGATAATTATCACACCCA | ID NO: 5353) |
| 192 | TGTTCATACAACCATAAAACGATAATTACACCCAT | CSYNHKTIITPIN (SEQ ID NO: 5452) **LSHP (SEQ |
| | AAATTGATAATTATCACACCCA | ID NO: 5353) |
| 193 | TGTTGATACAACCATAAAACGATAATTACACCCAT | C*YNHKTIITPING (SEQ ID NO: 5453) *LSHP (SEQ |
| | AAATGGATAATTATCACACCCA | ID NO: 5353) |
| 194 | TGTTGATACAACCATAAAACGATAATTACACCCAT | C*YNHKTIITPINSLSHP (SEQ ID NO: 5353) |
| | AAATTCATAATTATCACACCCA | |
| 195 | TGTCGATACAACCATAAAACGATAATTACACCCAT | CRYNHKTIITPING (SEQ ID NO: 5454) *LSHP (SEQ |
| | AAATGGATAATTATCACACCCA | ID NO: 5353) |
| 196 | TGTCGATACAACCATAAAACGATAATTACACCCAT | CRYNHKTIITPINS (SEQ ID NO: 5455) *LSHP (SEQ |
| | AAATTCATAATTATCACACCCA | ID NO: 5353) |
| 197 | TGTGGATACAACCATAAAACGATAATTACACCCAT | CGYNHKTIITPING (SEQ ID NO: 5456) *LSHP (SEQ |
| | AAATGGATAATTATCACACCCA | ID NO: 5353) |
| 198 | TGTGGATACAACCATAAAACGATAATTACACCCAT | CGYNHKTIITPINS (SEQ ID NO: 5457) *LSHP (SEQ |
| | AAATTCATAATTATCACACCCA | ID NO: 5353) |
| 199 | TGTTCATACAACCATAAAACGATAATTACACCCAT | CSYNHKTIITPING (SEQ ID NO: 5458) *LSHP (SEQ |
| | AAATGGATAATTATCACACCCA | ID NO: 5353) |
| 200 | TGTTCATACAACCATAAAACGATAATTACACCCAT | CSYNHKTIITPINS (SEQ ID NO: 5459) *LSHP (SEQ |
| | AAATTCATAATTATCACACCCA | ID NO: 5353) |
| 201 | TGTTGATACAACCATAAAACGATAATTACACCCAT | C*YNHKTIITPIN (SEQ ID NO: 5449) *SLSHP (SEQ |
| | AAATTGATCATTATCACACCCA | ID NO: 5372) |
| 202 | TGTCGATACAACCATAAAACGATAATTACACCCAT | CRYNHKTIITPIN (SEQ ID NO: 5450) *SLSHP (SEQ |
| | AAATTGATCATTATCACACCCA | ID NO: 5372) |
| 203 | TGTGGATACAACCATAAAACGATAATTACACCCAT | CGYNHKTIITPIN (SEQ ID NO: 5451) *SLSHP (SEQ |
| | AAATTGATCATTATCACACCCA | ID NO: 5372) |
| 204 | TGTTCATACAACCATAAAACGATAATTACACCCAT | CSYNHKTIITPIN (SEQ ID NO: 5452) *SLSHP (SEQ |
| | AAATTGATCATTATCACACCCA | ID NO: 5372) |
| 205 | TGTTGATACAACCATAAAACGATAATTACACCCAT | C*YNHKTIITPINGSLSHP (SEQ ID NO: 5460) |
| | AAATGGATCATTATCACACCCA | |
| 206 | TGTTGATACAACCATAAAACGATAATTACACCCAT | C*YNHKTIITPINSSLSHP (SEQ ID NO: 5461) |
| | AAATTCATCATTATCACACCCA | |
| 207 | TGTCGATACAACCATAAAACGATAATTACACCCAT | CRYNHKTIITPINGSLSHP (SEQ ID NO: 5462) |
| | AAATGGATCATTATCACACCCA | |
| 208 | TGTCGATACAACCATAAAACGATAATTACACCCAT | CRYNHKTIITPINSSLSHP (SEQ ID NO: 5463) |
| | AAATTCATCATTATCACACCCA | |
| 209 | TGTGGATACAACCATAAAACGATAATTACACCCAT | CGYNHKTIITPINGSLSHP (SEQ ID NO: 5355) |
| | AAATGGATCATTATCACACCCA | |
| 210 | TGTGGATACAACCATAAAACGATAATTACACCCAT | CGYNHKTIITPINSSLSHP (SEQ ID NO: 5464) |
| | AAATTCATCATTATCACACCCA | |
| 211 | TGTTCATACAACCATAAAACGATAATTACACCCAT | CSYNHKTITPINGSLSHP (SEQ ID NO: 5465) |
| | AAATGGATCATTATCACACCCA | |
| 212 | TGTTCATACAACCATAAAACGATAATTACACCCAT | CSYNHKTITPINSSLSHP (SEQ ID NO: 5466) |
| | AAATTCATCATTATCACACCCA | |
| 213 | TGTTGATCCAACCATAAAATGATAATTACACCCAT | C*SNHKMIITPIN (SEQ ID NO: 5467) **LSHP (SEQ |
| | AAATTGATAATTATCACACCCA | ID NO: 5353) |
| 214 | TGTCGATCCAACCATAAAATGATAATTACACCCAT | CRSNHKMIITPIN (SEQ ID NO: 5468) **LSHP (SEQ |
| | AAATTGATAATTATCACACCCA | ID NO: 5353) |
| 215 | TGTGGATCCAACCATAAAATGATAATTACACCCAT | CGSNHKMIITPIN (SEQ ID NO: 5469) **LSHP (SEQ |
| | AAATTGATAATTATCACACCCA | ID NO: 5353) |
| 216 | TGTTCATCCAACCATAAAATGATAATTACACCCAT | CSSNHKMIITPIN (SEQ ID NO: 5470) **LSHP (SEQ |
| | AAATTGATAATTATCACACCCA | ID NO: 5353) |
| 217 | TGTTGATCCAACCATAAAATGATAATTACACCCAT | C*SNHKMIITPING (SEQ ID NO: 5471) *LSHP (SEQ |
| | AAATGGATAATTATCACACCCA | ID NO: 5353) |
| 218 | TGTTGATCCAACCATAAAATGATAATTACACCCAT | C*SNHKMIITPINS (SEQ ID NO: 5472) *LSHP (SEQ |
| | AAATTCATAATTATCACACCCA | ID NO: 5353) |
| 219 | TGTCGATCCAACCATAAAATGATAATTACACCCAT | CRSNHKMIITPING (SEQ ID NO: 5473) *LSHP (SEQ |
| | AAATGGATAATTATCACACCCA | ID NO: 5353) |
| 220 | TGTCGATCCAACCATAAAATGATAATTACACCCAT | CRSNHKMIITPINS (SEQ ID NO: 5474) *LSHP (SEQ |
| | AAATTCATAATTATCACACCCA | ID NO: 5353) |
| 221 | TGTGGATCCAACCATAAAATGATAATTACACCCAT | CGSNHKMIITPING (SEQ ID NO: 5475) *LSHP (SEQ |
| | AAATGGATAATTATCACACCCA | ID NO: 5353) |
| 222 | TGTGGATCCAACCATAAAATGATAATTACACCCAT | CGSNHKMIITPINS (SEQ ID NO: 5476) *LSHP (SEQ |
| | AAATTCATAATTATCACACCCA | ID NO: 5353) |
| 223 | TGTTCATCCAACCATAAAATGATAATTACACCCAT | CSSNHKMIITPING (SEQ ID NO: 5477) *LSHP (SEQ |
| | AAATGGATAATTATCACACCCA | ID NO: 5353) |
| 224 | TGTTCATCCAACCATAAAATGATAATTACACCCAT | CSSNHKMITPINS (SEQ ID NO: 5478) *LSHP (SEQ |
| | AAATTCATAATTATCACACCCA | ID NO: 5353) |
| 225 | TGTTGATCCAACCATAAAATGATAATTACACCCAT | C*SNHKMIITPIN (SEQ ID NO: 5467) *SLSHP (SEQ |
| | AAATTGATCATTATCACACCCA | ID NO: 5372) |
| 226 | TGTCGATCCAACCATAAAATGATAATTACACCCAT | CRSNHKMITPIN (SEQ ID NO: 5468) *SLSHP (SEQ |
| | AAATTGATCATTATCACACCCA | ID NO: 5372) |
| 227 | TGTGGATCCAACCATAAAATGATAATTACACCCAT | CGSNHKMIITPIN (SEQ ID NO: 5469) *SLSHP (SEQ |
| | AAATTGATCATTATCACACCCA | ID NO: 5372) |
| 228 | TGTTCATCCAACCATAAAATGATAATTACACCCAT | CSSNHKMIITPIN (SEQ ID NO: 5470) *SLSHP (SEQ |
| | AAATTGATCATTATCACACCCA | ID NO: 5372) |
| 229 | TGTTGATCCAACCATAAAATGATAATTACACCCAT | C*SNHKMIITPINGSLSHP (SEQ ID NO: 5372) |
| | AAATGGATCATTATCACACCCA | |
| 230 | TGTTGATCCAACCATAAAATGATAATTACACCCAT | C*SNHKMIITPINSSLSHP (SEQ ID NO: 5479) |
| | AAATTCATCATTATCACACCCA | |
| 231 | TGTCGATCCAACCATAAAATGATAATTACACCCAT | CRSNHKMIITPINGSLSHP (SEQ ID NO: 5480) |
| | AAATGGATCATTATCACACCCA | |
| 232 | TGTCGATCCAACCATAAAATGATAATTACACCCAT | CRSNHKMIITPINSSLSHP (SEQ ID NO: 5481) |
| | AAATTCATCATTATCACACCCA | |
| 233 | TGTGGATCCAACCATAAAATGATAATTACACCCAT | CGSNHKMIITPINGSLSHP (SEQ ID NO: 5356) |
| | AAATGGATCATTATCACACCCA | |
| 234 | TGTGGATCCAACCATAAAATGATAATTACACCCAT | CGSNHKMIITPINSSLSHP (SEQ ID NO: 5482) |
| | AAATTCATCATTATCACACCCA | |
| 235 | TGTTCATCCAACCATAAAATGATAATTACACCCAT | CSSNHKMIITPINGSLSHP (SEQ ID NO: 5483) |
| | AAATGGATCATTATCACACCCA | |
| 236 | TGTTCATCCAACCATAAAATGATAATTACACCCAT | CSSNHKMIITPINSSLSHP (SEQ ID NO: 5484) |
| | AAATTCATCATTATCACACCCA | |
| 237 | TGTTGATACAACCATAAAATGATAATTCACCCATA | C*YNHKMIIHP (SEQ ID NO: 5485) *IDNYHTP |
| | AATTGATAATTATCACACCCCA | (SEQ ID NO: 5486) |
| 238 | TGTTGATACAACCATAAAATGATAATTCACCCATC | C*YNHKMIIHPSIDNYHTP (SEQ ID NO: 5487) |
| | AATTGATAATTATCACACCCCA | |
| 239 | TGTTCATACAACCATAAAATGATAATTCACCCATA | CSYNHKMIIHP (SEQ ID NO: 5488) *IDNYHTP |
| | AATTGATAATTATCACACCCCA | (SEQ ID NO: 5486) |
| 240 | TGTTCATACAACCATAAAATGATAATTCACCCATC | CSYNHKMIIHPSIDNYHTP (SEQ ID NO: 5489) |
| | AATTGATAATTATCACACCCCA | |
| 241 | TGTGGATACAACCATAAAATGATAATTCACCCATA | CGYNHKMIIHP (SEQ ID NO: 5490) *IDNYHTP |
| | AATTGATAATTATCACACCCCA | (SEQ ID NO: 5486) |
| 242 | TGTGGATACAACCATAAAATGATAATTCACCCATC | CGYNHKMIIHPSIDNYHTP (SEQ ID NO: 5491) |
| | AATTGATAATTATCACACCCCA | |
| 243 | TGTCGATACAACCATAAAATGATAATTCACCCATA | CRYNHKMIIHP (SEQ ID NO: 5492) *IDNYHTP |
| | AATTGATAATTATCACACCCCA | (SEQ ID NO: 5486) |
| 244 | TGTCGATACAACCATAAAATGATAATTCACCCATC | CRYNHKMIIHPSIDNYHTP (SEQ ID NO: 5493) |
| | AATTGATAATTATCACACCCCA | |
| 245 | TGTTGATACAACCATAAAATGATAATTACCACCCA | C*YNHKMIITTHKLIIITP (SEQ ID NO: 5494) |
| | TAAATTGATAATTATCACACCC | |
| 246 | TGTTGATACAACCATAAAATGATAATTACCACCCC | C*YNHKMIITTPKLIIITP (SEQ ID NO: 5495) |
| | TAAATTGATAATTATCACACCC | |
| 247 | TGTTGATACAACCATAAAATGATAATTACCACCCA | C*YNHKMIITTHTLIIITP (SEQ ID NO: 5496) |
| | TACATTGATAATTATCACACCC | |
| 248 | TGTTGATACAACCATAAAATGATAATTACCACCCC | C*YNHKMIITTPTLIIITP (SEQ ID NO: 5497) |
| | TACATTGATAATTATCACACCC | |
| 249 | TGTTCATACAACCATAAAATGATAATTACCACCCA | CSYNHKMIITTHKLIITP (SEQ ID NO: 5498) |
| | TAAATTGATAATTATCACACCC | |
| 250 | TGTTCATACAACCATAAAATGATAATTACCACCCC | CSYNHKMITTPKLIIITP (SEQ ID NO: 5499) |
| | TAAATTGATAATTATCACACCC | |
| 251 | TGTTCATACAACCATAAAATGATAATTACCACCCA | CSYNHKMIITTHTLIIITP (SEQ ID NO: 5500) |
| | TACATTGATAATTATCACACCC | |
| 252 | TGTTCATACAACCATAAAATGATAATTACCACCCC | CSYNHKMIITTPTLIITP (SEQ ID NO: 5501) |
| | TACATTGATAATTATCACACCC | |
| 253 | TGTGGATACAACCATAAAATGATAATTACCACCCA | CGYNHKMIITTHKLIIITP (SEQ ID NO: 5502) |
| | TAAATTGATAATTATCACACCC | |
| 254 | TGTGGATACAACCATAAAATGATAATTACCACCCC | CGYNHKMIITTPKLIIITP (SEQ ID NO: 5503) |
| | TAAATTGATAATTATCACACCC | |
| 255 | TGTGGATACAACCATAAAATGATAATTACCACCCA | CGYNHKMIITTHTLIITP (SEQ ID NO: 5504) |
| | TACATTGATAATTATCACACCC | |
| 256 | TGTGGATACAACCATAAAATGATAATTACCACCCC | CGYNHKMIITTPTLIIITP (SEQ ID NO: 5505) |
| | TACATTGATAATTATCACACCC | |
| 257 | TGTCGATACAACCATAAAATGATAATTACCACCCA | CRYNHKMIITTHKLIIITP (SEQ ID NO: 5506) |
| | TAAATTGATAATTATCACACCC | |
| 258 | TGTCGATACAACCATAAAATGATAATTACCACCCC | CRYNHKMIITTPKLIIITP (SEQ ID NO: 5507) |
| | TAAATTGATAATTATCACACCC | |
| 259 | TGTCGATACAACCATAAAATGATAATTACCACCCA | CRYNHKMITTHTLIITP (SEQ ID NO: 5508) |
| | TACATTGATAATTATCACACCC | |
| 260 | TGTCGATACAACCATAAAATGATAATTACCACCCC | CRYNHKMIITTPTLIITP (SEQ ID NO: 5509) |
| | TACATTGATAATTATCACACCC | |
| 18 | TGTTGATACAACCATAAAATGATAATTACACCCAT | C*YNHKMIITPIN (SEQ ID NO: 5352)**LSHP (SEQ |
| | AAATTGATAATTATCACACCCA | ID NO: 5353) |
| 69 | TCTTGATACAACCATAAAATGATAATTACACCCAT | S*YNHKMIITPIN (SEQ ID NO: 5352)**LSHP (SEQ |
| | AAATTGATAATTATCACACCCA | ID NO: 5353) |
| 23 | TGTGGATACAACCATAAAATGATAATTACACCCAT | CGYNHKMIITPIN(SEQ ID NO: 5362) * *LSHP (SEQ |
| | AAATTGATAATTATCACACCCA | ID NO: 5353) |
| 264 | TGTTTATACAACCATAAAATGATAATTACACCCAT | CLYNHKMIITPIN (SEQ ID NO: 5510) **LSHP (SEQ |
| | AAATTGATAATTATCACACCCA | ID NO: 5353) |
| 24 | TGTTCATACAACCATAAAATGATAATTACACCCAT | CSYNHKMIITPIN(SEQ ID NO: 5363) * *LSHP (SEQ |
| | AAATTGATAATTATCACACCCA | ID NO: 5353) |
| 266 | TGTTGAAACAACCATAAAATGATAATTACACCCAT | C*NNHKMIITPIN (SEQ ID NO: 5511) **LSHP (SEQ |
| | AAATTGATAATTATCACACCCA | ID NO: 5353) |
| 213 | TGTTGATCCAACCATAAAATGATAATTACACCCAT | C*SNHKMIITPIN (SEQ ID NO: 5467) **LSHP (SEQ |
| | AAATTGATAATTATCACACCCA | ID NO: 5353) |
| 268 | TGTTGATACATCCATAAAATGATAATTACACCCAT | C*YIHKMITPIN (SEQ ID NO: 5512) **LSHP (SEQ |
| | AAATTGATAATTATCACACCCA | ID NO: 5353) |
| 269 | TGTTGATACACCCATAAAATGATAATTACACCCAT | C*YTHKMIITPIN (SEQ ID NO: 5513) **LSHP (SEQ |
| | AAATTGATAATTATCACACCCA | ID NO: 5353) |
| 270 | TGTTGATACAGCCATAAAATGATAATTACACCCAT | C*YSHKMIITPIN (SEQ ID NO: 5514) **LSHP (SEQ |
| | AAATTGATAATTATCACACCCA | ID NO: 5353) |
| 271 | TGTTGATACAACAATAAAATGATAATTACACCCAT | C*YNNKMIITPIN (SEQ ID NO: 5515) **LSHP (SEQ |
| | AAATTGATAATTATCACACCCA | ID NO: 5353) |
| 272 | TGTTGATACAACCTTAAAATGATAATTACACCCAT | C*YNLKMIITPIN (SEQ ID NO: 5516) **LSHP (SEQ |
| | AAATTGATAATTATCACACCCA | ID NO: 5353) |
| 117 | TGTTGATACAACCCTAAAATGATAATTACACCCAT | C*YNPKMITPIN (SEQ ID NO: 5412) **LSHP (SEQ |
| | AAATTGATAATTATCACACCCA | ID NO: 5353) |
| 274 | TGTTGATACAACCAAAAAATGATAATTACACCCAT | C*YNQKMIITPIN (SEQ ID NO: 5517) **LSHP (SEQ |
| | AAATTGATAATTATCACACCCA | ID NO: 5353) |
| 275 | TGTTGATACAACCAGAAAATGATAATTACACCCAT | C*YNQKMIITPIN (SEQ ID NO: 5517) **LSHP (SEQ |
| | AAATTGATAATTATCACACCCA | ID NO: 5353) |
| 276 | TGTTGATACAACCATATAATGATAATTACACCCAT | C*YNHIMIITPIN (SEQ ID NO: 5518) **LSHP (SEQ |
| | AAATTGATAATTATCACACCCA | ID NO: 5353) |
| 277 | TGTTGATACAACCATACAATGATAATTACACCCAT | C*YNHTMIITPIN (SEQ ID NO: 5519) **LSHP (SEQ |
| | AAATTGATAATTATCACACCCA | ID NO: 5353) |
| 278 | TGTTGATACAACCATAAATTGATAATTACACCCAT | C*YNHKLIITPIN (SEQ ID NO: 5520) **LSHP (SEQ |
| | AAATTGATAATTATCACACCCA | ID NO: 5353) |
| 279 | TGTTGATACAACCATAAACTGATAATTACACCCAT | C*YNHKLIITPIN (SEQ ID NO: 5520) **LSHP (SEQ |
| | AAATTGATAATTATCACACCCA | ID NO: 5353) |
| 280 | TGTTGATACAACCATAAAGTGATAATTACACCCAT | C*YNHKVIITPIN (SEQ ID NO: 5521) **LSHP (SEQ |
| | AAATTGATAATTATCACACCCA | ID NO: 5353) |
| 189 | TGTTGATACAACCATAAAACGATAATTACACCCAT | C*YNHKTIITPIN (SEQ ID NO: 5449) **LSHP (SEQ |
| | AAATTGATAATTATCACACCCA | ID NO: 5353) |
| 282 | TGTTGATACAACCATAAAATTATAATTACACCCAT | C*YNHKIIITPIN (SEQ ID NO: 5522) **LSHP (SEQ ID NO: |
| | AAATTGATAATTATCACACCCA | 5353) |
| 283 | TGTTGATACAACCATAAAATCATAATTACACCCAT | C*YNHKIIITPIN (SEQ ID NO: 5522) **LSHP (SEQ ID NO: |
| | AAATTGATAATTATCACACCCA | 5353) |
| 284 | TGTTGATACAACCATAAAATAATAATTACACCCAT | C*YNHKIIITPIN (SEQ ID NO: 5522) **LSHP (SEQ ID NO: |
| | AAATTGATAATTATCACACCCA | 5353) |
| 285 | TGTTGATACAACCATAAAATGATAATTACACCCAT | C*YNHKMIITPII (SEQ ID NO: 5523) **LSHP (SEQ ID NO: |
| | AATTTGATAATTATCACACCCA | 5353) |
| 286 | TGTTGATACAACCATAAAATGATAATTACACCCAT | C*YNHKMIITPIT (SEQ ID NO: 5524) **LSHP (SEQ |
| | AACTTGATAATTATCACACCCA | ID NO: 5353) |
| 287 | TGTTGATACAACCATAAAATGATAATTACACCCAT | C*YNHKMIITPIS (SEQ ID NO: 5526) **LSHP (SEQ |
| | AAGTTGATAATTATCACACCCA | ID NO: 5353) |
| 25 | TGTTGATACAACCATAAAATGATAATTACACCCAT | C*YNHKMIITPING(SEQ ID NO: 5364) * LSHP (SEQ |
| | AAATGGATAATTATCACACCCA | ID NO: 5353) |
| 289 | TGTTGATACAACCATAAAATGATAATTACACCCAT | C*YNHKMIITPINL (SEQ ID NO: 5527) *LSHP (SEQ |
| | AAATTTATAATTATCACACCCA | ID NO: 5353) |
| 26 | TGTTGATACAACCATAAAATGATAATTACACCCAT | C*YNHKMIITPINS(SEQ ID NO: 5365) * LSHP (SEQ |
| | AAATTCATAATTATCACACCCA | ID NO: 5353) |
| 291 | TGTTGATACAACCATAAAATGATAATTACACCCAT | C*YNHKMIITPIN (SEQ ID NO: 5352)*QLSHP (SEQ |
| | AAATTGACAATTATCACACCCA | ID NO: 5528) |
| 292 | TGTTGATACAACCATAAAATGATAATTACACCCAT | C*YNHKMIITPIN (SEQ ID NO: 5352)*LLSHP (SEQ |
| | AAATTGATTATTATCACACCCA | ID NO: 5529) |
| 33 | TGTTGATACAACCATAAAATGATAATTACACCCAT | C*YNHKMIITPIN (SEQ ID NO: 5352)*SLSHP (SEQ |
| | AAATTGATCATTATCACACCCA | ID NO: 5372) |
| 294 | TGTTGATACAACCATAAAATGATAATTACACCCAT | C*YNHKMIITPIN (SEQ ID NO: 5352)**LSNP (SEQ |
| | AAATTGATAATTATCAAACCCA | ID NO: 5543) |
| 298 | TGTTGATACAACCATAAAATGATAATTACACCCAT | C*YNHKMIITPIN (SEQ ID NO: 5352)**LSLP (SEQ |
| | AAATTGATAATTATCACTOCCA | ID NO: 5544) |
| 141 | TGTTGATACAACCATAAAATGATAATTACACCCAT | C*YNHKMIITPIN (SEQ ID NO: 5352)**LSPP (SEQ |
| | AAATTGATAATTATCACCCCCA | ID NO: 5432) |
| 29 | TGTGGATACAACCATAAAATGATAATTACACCCAT | CGYNHKMIITPING (SEQ ID NO: 5368) * LSHP |
| | AAATGGATAATTATCACACCCA | (SEQ ID NO: 5353) |
| 298 | TGTGGATACAACCATAAAATGATAATTACACCCAT | CGYNHKMIITPINL (SEQ ID NO: 5530) *LSHP (SEQ |
| | AAATTTATAATTATCACACCCA | ID NO: 5353) |
| 30 | TGTGGATACAACCATAAAATGATAATTACACCCAT | CGYNHKMIITPINS (SEQ ID NO: 5369) * LSHP |
| | AAATTCATAATTATCACACCCA | (SEQ ID NO: 5353) |
| 300 | TGTTTATACAACCATAAAATGATAATTACACCCAT | CLYNHKMITPING (SEQ ID NO: 5531) *LSHP (SEQ |
| | AAATGGATAATTATCACACCCA | ID NO: 5353) |
| 301 | TGTTTATACAACCATAAAATGATAATTACACCCAT | CLYNHKMIITPINL (SEQ ID NO: 5532) *LSHP (SEQ |
| | AAATTTATAATTATCACACCCA | ID NO: 5353) |
| 302 | TGTTTATACAACCATAAAATGATAATTACACCCAT | CLYNHKMIITPINS (SEQ ID NO: 5533) *LSHP (SEQ |
| | AAATTCATAATTATCACACCCA | ID NO: 5353) |
| 303 | TGTTGATACAACCATAAAATGATAATTACACCCAT | C*YNHKMIITPINGLLSHP (SEQ ID NO: 5534) |
| | AAATGGATTATTATCACACCCA | |
| 304 | TGTTGATACAACCATAAAATGATAATTACACCCAT | C*YNHKMIITPINLLLSHP (SEQ ID NO: 5535) |
| | AAATTTATTATTATCACACCCA | |
| 305 | TGTTGATACAACCATAAAATGATAATTACACCCAT | C*YNHKMIITPINSLLSHP (SEQ ID NO: 5536) |
| | AAATTCATTATTATCACACCCA | |
| 306 | TGTGGATACAACCATAAAATGATAATTACACCCAT | CGYNHKMIITPINGLLSHP (SEQ ID NO: 5537) |
| | AAATGGATTATTATCACACCCA | |
| 307 | TGTGGATACAACCATAAAATGATAATTACACCCAT | CGYNHKMIITPINLLLSHP (SEQ ID NO: 5538) |
| | AAATTTATTATTATCACACCCA | |
| 308 | TGTGGATACAACCATAAAATGATAATTACACCCAT | CGYNHKMIITPINSLLSHP (SEQ ID NO: 5539) |
| | AAATTCATTATTATCACACCCA | |
| 309 | TGTTTATACAACCATAAAATGATAATTACACCCAT | CLYNHKMIITPINGLLSHP (SEQ ID NO: 5540) |
| | AAATGGATTATTATCACACCCA | |
| 310 | TGTTTATACAACCATAAAATGATAATTACACCCAT | CLYNHKMIITPINLLLSHP (SEQ ID NO: 5541) |
| | AAATTTATTATTATCACACCCA | |
| 302 | TGTTTATACAACCATAAAATGATAATTACACCCAT | CLYNHKMIITPINSLLSHP (SEQ ID NO: 5542) |
| | AAATTCATTATTATCACACCCA | |

Frame 2

| | | |
|---|---|---|
| 18 | TGTTGATACAACCATAAAATGATAATTACACCCAT | [X]VDTTIK (SEQ ID NO: 5545) |
| | AAATTGATAATTATCACACCCA | **LHP*IDNYHT[Q/H] (SEQ ID NO: 5546) |
| 316 | TGTTGATACAACCATAAAAGGATAATTACACCCAT | [X]VDTTIKG (SEQ ID NO: 5547) |
| | AAATTGATAATTATCACACCCA | *LHP*IDNYHT[Q/H] (SEQ ID NO: 5546) |
| 283 | TGTTGATACAACCATAAAATCATAATTACACCCAT | [X]VDTTIKS (SEQ ID NO: 5548) |
| | AAATTGATAATTATCACACCCA | *LHP*IDNYHT[Q/H] (SEQ ID NO: 5546) |
| 318 | TGTTGATACAACCATAAAATGATCATTACACCCAT | [X]VDTTIK (SEQ ID NO: 5545) *SLHP (SEQ ID NO: |
| | AAATTGATAATTATCACACCCA | 5549) *IDNYHT[Q/H] (SEQ ID NO: 5546) |
| 319 | TGTTGATACAACCATAAAAGGATCATTACACCCAT | [X]VDTTIKGSLHP (SEQ ID NO: 5550) |
| | AAATTGATAATTATCACACCCA | *IDNYHT[Q/H] (SEQ ID NO: 5546) |
| 320 | TGTTGATACAACCATAAAATCATCATTACACCCAT | [X]VDTTIKSSLHP (SEQ ID NO: 5551) |
| | AAATTGATAATTATCACACCCA | *IDNYHT[Q/H] (SEQ ID NO: 5546) |
| 321 | TGTTGATACAACCATAAAATGATAATTACACCCAT | [X]VDTTIK (SEQ ID NO: 5545) |
| | CAATTGATAATTATCACACCCA | **LHPSIDNYHT[Q/H] (SEQ ID NO: 5552) |
| 322 | TGTTGATACAACCATAAAAGGATAATTACACCCAT | [X]VDTTIKG (SEQ ID NO: 5547) |
| | CAATTGATAATTATCACACCCA | *LHPSIDNYHT[Q/H] (SEQ ID NO: 5552) |
| 323 | TGTTGATACAACCATAAAATCATAATTACACCCAT | [X]VDTTIKS (SEQ ID NO: 5548) |
| | CAATTGATAATTATCACACCCA | *LHPSIDNYHT[Q/H] (SEQ ID NO: 5552) |
| 324 | TGTTGATACAACCATAAAATGATCATTACACCCAT | [X]VDTTIK (SEQ ID NO: 5545) |
| | CAATTGATAATTATCACACCCA | *SLHPSIDNYHT[Q/H] (SEQ ID NO: 5553) |
| 325 | TGTTGATACAACCATAAAAGGATCATTACACCCAT | [X]VDTTIKGSLHPSIDNYHT[Q/H] (SEQ ID NO: |
| | CAATTGATAATTATCACACCCA | 5554) |
| 326 | TGTTGATACAACCATAAAATCATCATTACACCCAT | [X]VDTTIKSSLHPSIDNYHT[Q/H] (SEQ ID NO: |
| | CAATTGATAATTATCACACCCA | 5555) |
| 327 | TGTTGATACAACCATAAAATGATAATTACCCCCAT | [X]VDTTIK (SEQ ID NO: 5545) |
| | AAATTGATAATTATCACACCCA | **LPP*IDNYHT[Q/H] (SEQ ID NO: 5546) |
| 328 | TGTTGATACAACCATAAAAGGATAATTACCCCCAT | [X]VDTTIKG (SEQ ID NO: 5547) |
| | AAATTGATAATTATCACACCCA | *LPP*IDNYHT[Q/H] (SEQ ID NO: 5546) |
| 329 | TGTTGATACAACCATAAAATCATAATTACCCCCAT | [X]VDTTIKS (SEQ ID NO: 5548) |
| | AAATTGATAATTATCACACCCA | *LPP*IDNYHT[Q/H] (SEQ ID NO: 5546) |
| 330 | TGTTGATACAACCATAAAATGATCATTACCCCCAT | [X]VDTTIK (SEQ ID NO: 5545) *SLPP (SEQ ID NO: |
| | AAATTGATAATTATCACACCCA | 5556) *IDNYHT[Q/H] (SEQ ID NO: 5546) |
| 331 | TGTTGATACAACCATAAAAGGATCATTACCCCCAT | [X]VDTTIKGSLPP (SEQ ID NO: 5557) |
| | AAATTGATAATTATCACACCCA | *IDNYHT[Q/H] (SEQ ID NO: 5546) |
| 332 | TGTTGATACAACCATAAAATCATCATTACCCCCAT | [X]VDTTIKSSLPP (SEQ ID NO: 5558) |
| | AAATTGATAATTATCACACCCA | *IDNYHT[Q/H] (SEQ ID NO: 5546) |
| 333 | TGTTGATACAACCATAAAATGATAATTACCCCCAT | [X]VDTTIK (SEQ ID NO: 5545) |
| | CAATTGATAATTATCACACCCA | **LPPSIDNYHT[Q/H] (SEQ ID NO: 5559) |
| 334 | TGTTGATACAACCATAAAAGGATAATTACCCCCAT | [X]VDTTIKG (SEQ ID NO: 5547) |
| | CAATTGATAATTATCACACCCA | *LPPSIDNYHT[Q/H] (SEQ ID NO: 5559) |
| 335 | TGTTGATACAACCATAAAATCATAATTACCCCCAT | [X]VDTTIKS (SEQ ID NO: 5548) |
| | CAATTGATAATTATCACACCCA | *LPPSIDNYHT[Q/H] (SEQ ID NO: 5559) |
| 336 | TGTTGATACAACCATAAAATGATCATTACCCCCAT | [X]VDTTIK (SEQ ID NO: 5545) |
| | CAATTGATAATTATCACACCCA | *SLPPSIDNYHT[Q/H] (SEQ ID NO: 5560) |
| 337 | TGTTGATACAACCATAAAAGGATCATTACCCCCAT | [X]VDTTIKGSLPPSIDNYHT[Q/H] (SEQ ID NO: |
| | CAATTGATAATTATCACACCCA | 5561) |
| 338 | TGTTGATACAACCATAAAATCATCATTACCCCCAT | [X]VDTTIKSSLPPSIDNYHT[Q/H] (SEQ ID NO: |
| | CAATTGATAATTATCACACCCA | 5562) |
| 339 | TGTTGATACAACCATAAAATGATAATTACACCCAT | [X]VDTTIK (SEQ ID NO: 5545) |
| | AAATTGATAATTATCCCACCCA | **LHP*IDNYPT[Q/H] (SEQ ID NO: 5563) |
| 340 | TGTTGATACAACCATAAAAGGATAATTACACCCAT | [X]VDTTIKG (SEQ ID NO: 5547) |
| | AAATTGATAATTATCCCACCCA | *LHP*IDNYPT[Q/H] (SEQ ID NO: 5563) |
| 341 | TGTTGATACAACCATAAAATCATAATTACACCCAT | [X]VDTTIKS (SEQ ID NO: 5548) |
| | AAATTGATAATTATCCCACCCA | *LHP*IDNYPT[Q/H] (SEQ ID NO: 5563) |
| 342 | TGTTGATACAACCATAAAATGATCATTACACCCAT | [X]VDTTIK (SEQ ID NO: 5545) *SLHP (SEQ ID NO: |
| | AAATTGATAATTATCCCACCCA | 5549) *IDNYPT[Q/H] (SEQ ID NO: 5563) |
| 343 | TGTTGATACAACCATAAAAGGATCATTACACCCAT | [X]VDTTIKGSLHP (SEQ ID NO: 5550) |
| | AAATTGATAATTATCCCACCCA | *IDNYPT[Q/H] (SEQ ID NO: 5563) |
| 344 | TGTTGATACAACCATAAAATCATCATTACACCCAT | [X]VDTTIKSSLHP (SEQ ID NO: 5551) |
| | AAATTGATAATTATCCCACCCA | *IDNYPT[Q/H] (SEQ ID NO: 5563) |
| 345 | TGTTGATACAACCATAAAATGATAATTACACCCAT | [X]VDTTIK (SEQ ID NO: 5545) |
| | CAATTGATAATTATCCCACCCA | **LHPSIDNYPT[Q/H] (SEQ ID NO: 5564) |
| 346 | TGTTGATACAACCATAAAAGGATAATTACACCCAT | [X]VDTTIKG (SEQ ID NO: 5547) |
| | CAATTGATAATTATCCCACCCA | *LHPSIDNYPT[Q/H] (SEQ ID NO: 5564) |
| 347 | TGTTGATACAACCATAAAATCATAATTACACCCAT | [X]VDTTIKS (SEQ ID NO: 5548) |
| | CAATTGATAATTATCCCACCCA | *LHPSIDNYPT[Q/H] (SEQ ID NO: 5564) |
| 348 | TGTTGATACAACCATAAAATGATCATTACACCCAT | [X]VDTTIK (SEQ ID NO: 5545) |
| | CAATTGATAATTATCCCACCCA | *SLHPSIDNYPT[Q/H] (SEQ ID NO: 5565) |
| 349 | TGTTGATACAACCATAAAAGGATCATTACACCCAT | [X]VDTTIKGSLHPSIDNYPT[Q/H] (SEQ ID NO: |
| | CAATTGATAATTATCCCACCCA | 5566) |
| 350 | TGTTGATACAACCATAAAATCATCATTACACCCAT | [X]VDTTIKSSLHPSIDNYPT[Q/H] (SEQ ID NO: |
| | CAATTGATAATTATCCCACCCA | 5567) |
| 351 | TGTTGATACAACCATAAAATGATAATTACACCCAT | [X]VDTTIK (SEQ ID NO: 5545) **LHP*IDNYHTP |
| | AAATTGATAATTATCACACCCC | (SEQ ID NO: 5486) |
| 352 | TGTTGATACAACCATAAAAGGATAATTACACCCAT | [X]VDTTIKG (SEQ ID NO: 5547) *LHP*IDNYHTP |
| | AAATTGATAATTATCACACCCC | (SEQ ID NO: 5486) |
| 353 | TGTTGATACAACCATAAAATCATAATTACACCCAT | [X]VDTTIKS (SEQ ID NO: 5548) *LHP*IDNYHTP |
| | AAATTGATAATTATCACACCCC | (SEQ ID NO: 5486) |
| 354 | TGTTGATACAACCATAAAATGATCATTACACCCAT | [X]VDTTIK (SEQ ID NO: 5545) *SLHP (SEQ ID NO: |
| | AAATTGATAATTATCACACCCC | 5549) *IDNYHTP (SEQ ID NO: 5486) |
| 355 | TGTTGATACAACCATAAAAGGATCATTACACCCAT | [X]VDTTIKGSLHP (SEQ ID NO: 5550) *IDNYHTP |
| | AAATTGATAATTATCACACCCC | (SEQ ID NO: 5486) |
| 356 | TGTTGATACAACCATAAAATCATCATTACACCCAT | [X]VDTTIKSSLHP (SEQ ID NO: 5551) *IDNYHTP |
| | AAATTGATAATTATCACACCCC | (SEQ ID NO: 5486) |
| 357 | TGTTGATACAACCATAAAATGATAATTACACCCAT | [X]VDTTIK (SEQ ID NO: 5545) **LHPSIDNYHTP |
| | CAATTGATAATTATCACACCCC | (SEQ ID NO: 5568) |
| 358 | TGTTGATACAACCATAAAAGGATAATTACACCCAT | [X]VDTTIKG (SEQ ID NO: 5547) *LHPSIDNYHTP |
| | CAATTGATAATTATCACACCCC | (SEQ ID NO: 5568) |
| 359 | TGTTGATACAACCATAAAATCATAATTACACCCAT | [X]VDTTIKS (SEQ ID NO: 5548) *LHPSIDNYHTP |
| | CAATTGATAATTATCACACCCC | (SEQ ID NO: 5568) |
| 360 | TGTTGATACAACCATAAAATGATCATTACACCCAT | [X]VDTTIK (SEQ ID NO: 5545) *SLHPSIDNYHTP |
| | CAATTGATAATTATCACACCCC | (SEQ ID NO: 5569) |
| 361 | TGTTGATACAACCATAAAAGGATCATTACACCCAT | [X]VDTTIKGSLHPSIDNYHTP (SEQ ID NO: 5570) |
| | CAATTGATAATTATCACACCCC | |
| 362 | TGTTGATACAACCATAAAATCATCATTACACCCAT | [X]VDTTIKSSLHPSIDNYHTP (SEQ ID NO: 5571) |
| | CAATTGATAATTATCACACCCC | |
| 363 | TGTTGATACAACCATAAAATGATAATTACCCCCAT | [X]VDTTIK (SEQ ID NO: 5545) |
| | AAATTGATAATTATCCCACCCA | **LPP*IDNYPT[Q/H] (SEQ ID NO: 5563) |
| 364 | TGTTGATACAACCATAAAAGGATAATTACCCCCAT | [X]VDTTIKG (SEQ ID NO: 5547) |
| | AAATTGATAATTATCCCACCCA | *LPP*IDNYPT[Q/H] (SEQ ID NO: 5563) |
| 365 | TGTTGATACAACCATAAAATCATAATTACCCCCAT | [X]VDTTIKS (SEQ ID NO: 5548) |
| | AAATTGATAATTATCCCACCCA | *LPP*IDNYPT[Q/H] (SEQ ID NO: 5563) |
| 366 | TGTTGATACAACCATAAAATGATCATTACCCCCAT | [X]VDTTIK (SEQ ID NO: 5545) *SLPP (SEQ ID NO: |
| | AAATTGATAATTATCCCACCCA | 5556) *IDNYPT[Q/H] (SEQ ID NO: 5563) |
| 367 | TGTTGATACAACCATAAAAGGATCATTACCCCCAT | [X]VDTTIKGSLPP (SEQ ID NO: 5557) |
| | AAATTGATAATTATCCCACCCA | *IDNYPT[Q/H] (SEQ ID NO: 5563) |
| 368 | TGTTGATACAACCATAAAATCATCATTACCCCCAT | [X]VDTTIKSSLPP (SEQ ID NO: 5558) |
| | AAATTGATAATTATCCCACCCA | *IDNYPT[Q/H] (SEQ ID NO: 5563) |
| 369 | TGTTGATACAACCATAAAATGATAATTACCCCCAT | [X]VDTTIK (SEQ ID NO: 5545) |
| | CAATTGATAATTATCCCACCCA | **LPPSIDNYPT[Q/H] (SEQ ID NO: 5572) |
| 370 | TGTTGATACAACCATAAAAGGATAATTACCCCCAT | [X]VDTTIKG (SEQ ID NO: 5547) |
| | CAATTGATAATTATCCCACCCA | *LPPSIDNYPT[Q/H] (SEQ ID NO: 5572) |
| 371 | TGTTGATACAACCATAAAATCATAATTACCCCCAT | [X]VDTTIKS (SEQ ID NO: 5548) |
| | CAATTGATAATTATCCCACCCA | *LPPSIDNYPT[Q/H] (SEQ ID NO: 5572) |
| 372 | TGTTGATACAACCATAAAATGATCATTACCCCCAT | [X]VDTTIK (SBQ ID NO: 5545) |
| | CAATTGATAATTATCCCACCCA | *SLPPSIDNYPT[Q/H] (SEQ ID NO: 5792) |
| 373 | TGTTGATACAACCATAAAAGGATCATTACCCCCAT | [X]VDTTIKGSLPPSIDNYPT[Q/H] (SEQ ID NO: |
| | CAATTGATAATTATCCCACCCA | 5793) |
| 374 | TGTTGATACAACCATAAAATCATCATTACCCCCAT | [X]VDTTIKSSLPPSIDNYPT[Q/H] (SEQ ID NO: |
| | CAATTGATAATTATCCCACCCA | 5794) |
| 375 | TGTTGATACAACCATAAAATGATAATTACCCCCAT | [X]VDTTIK (SEQ ID NO: 5545) **LPP*IDNYHTP |
| | AAATTGATAATTATCACACCCC | (SEQ ID NO: 5486) |
| 376 | TGTTGATACAACCATAAAAGGATAATTACCCCCAT | [X]VDTTIKG (SEQ ID NO: 5547) *LPP*IDNYHTP |
| | AAATTGATAATTATCACACCCC | (SEQ ID NO: 5486) |
| 377 | TGTTGATACAACCATAAAATCATAATTACCCCCAT | [X]VDTTIKS (SEQ ID NO: 5548) *LPP*IDNYHTP |
| | AAATTGATAATTATCACACCCC | (SEQ ID NO: 5486) |
| 378 | TGTTGATACAACCATAAAATGATCATTACCCCCAT | [X]VDTTIK (SEQ ID NO: 5545) *SLPP (SEQ ID NO: |
| | AAATTGATAATTATCACACCCC | 5556) *IDNYHTP (SEQ ID NO: 5486) |
| 379 | TGTTGATACAACCATAAAAGGATCATTACCCCCAT | [X]VDTTIKGSLPP (SEQ ID NO: 5557) *IDNYHTP |
| | AAATTGATAATTATCACACCCC | (SEQ ID NO: 5486) |
| 380 | TGTTGATACAACCATAAAATCATCATTACCCCCAT | [X]VDTTIKSSLPP (SEQ ID NO: 5558) *IDNYHTP |
| | AAATTGATAATTATCACACCCC | (SEQ ID NO: 5486) |
| 381 | TGTTGATACAACCATAAAATGATAATTACCCCCAT | [X]VDTTIK (SEQ ID NO: 5545) **LPPSIDNYHTP |
| | CAATTGATAATTATCACACCCC | (SEQ ID NO: 5795) |
| 382 | TGTTGATACAACCATAAAAGGATAATTACCCCCAT | [X]VDTTIKG (SEQ ID NO: 5547) |
| | CAATTGATAATTATCACACCCC | *LPPSIDNYHTP(SEQ ID NO: 5795) |
| 383 | TGTTGATACAACCATAAAATCATAATTACCCCCAT | [X]VDTTIKS (SEQ ID NO: 5548) |
| | CAATTGATAATTATCACACCCC | *LPPSIDNYHTP(SBQ ID NO: 5795) |
| 384 | TGTTGATACAACCATAAAATGATCATTACCCCCAT | [X]VDTTIK (SEQ ID NO: 5545) |
| | CAATTGATAATTATCACACCCC | *SLPPSIDNYHTP(SEQ ID NO: 5796) |
| 385 | TGTTGATACAACCATAAAAGGATCATTACCCCCAT | [X]VDTTIKGSLPPSIDNYHTP(SEQ ID NO: 5797) |
| | CAATTGATAATTATCACACCCC | |
| 386 | TGTTGATACAACCATAAAATCATCATTACCCCCAT | [X]VDTTIKSSLPPSIDNYHTP(SEQ ID NO: 5798) |
| | CAATTGATAATTATCACACCCC | |
| 387 | TGTTGATACAACCATAAAATGATAATTACACCCAT | [X]VDTTIK (SEQ ID NO: 5545) |
| | AAATTGATAATTATCCCACCCC | **LHP*IDNYPTP(SEQ ID NO: 5799) |
| 388 | TGTTGATACAACCATAAAAGGATAATTACACCCAT | [X]VDTTIKG (SEQ ID NO: 5547) |
| | AAATTGATAATTATCCCACCCC | *LHP*IDNYPTP(SEQ ID NO: 5799) |
| 389 | TGTTGATACAACCATAAAATCATAATTACACCCAT | [X]VDTTIKS (SEQ ID NO: 5548) |
| | AAATTGATAATTATCCCACCCC | *LHP*IDNYPTP(SEQ ID NO: 5799) |
| 390 | TGTTGATACAACCATAAAATGATCATTACACCCAT | [X]VDTTIK (SEQ ID NO: 5545) *SLHP (SEQ ID NO: |
| | AAATTGATAATTATCCCACCCC | 5549) *IDNYPTP(SEQ ID NO: 5799) |
| 391 | TGTTGATACAACCATAAAAGGATCATTACACCCAT | [X]VDTTIKGSLHP (SEQ ID NO: 5550) |
| | AAATTGATAATTATCCCACCCC | *IDNYPTP(SEQ ID NO: 5799) |
| 392 | TGTTGATACAACCATAAAATCATCATTACACCCAT | [X]VDTTIKSSLHP (SEQ ID NO: 5551) |
| | AAATTGATAATTATCCCACCCC | *IDNYPTP(SEQ ID NO: 5799) |
| 393 | TGTTGATACAACCATAAAATGATAATTACACCCAT | [X]VDTTIK (SEQ ID NO: 5545) **LHPSIDNYPTP |
| | CAATTGATAATTATCCCACCCC | (SEQ ID NO: 5800) |
| 394 | TGTTGATACAACCATAAAAGGATAATTACACCCAT | [X]VDTTIKG (SEQ ID NO: 5547) |
| | CAATTGATAATTATCCCACCCC | *LHPSIDNYPTP(SEQ ID NO: 5800) |
| 395 | TGTTGATACAACCATAAAATCATAATTACACCCAT | [X]VDTTIKS (SEQ ID NO: 5548) |
| | CAATTGATAATTATCCCACCCC | *LHPSIDNYPTP(SEQ ID NO: 5800) |
| 396 | TGTTGATACAACCATAAAATGATCATTACACCCAT | [X]VDTTIK (SEQ ID NO: 5545) |
| | CAATTGATAATTATCCCACCCC | *SLHPSIDNYPTP(SEQ ID NO: 5801) |
| 397 | TGTTGATACAACCATAAAAGGATCATTACACCCAT | [X]VDTTIKGSLHPSIDNYPTP (SEQ ID NO: 5802) |
| | CAATTGATAATTATCCCACCCC | |
| 398 | TGTTGATACAACCATAAAATCATCATTACACCCAT | [X]VDTTIKSSLHPSIDNYPTP (SEQ ID NO: 5803) |
| | CAATTGATAATTATCCCACCCC | |
| 399 | TGTTGATACAACCATAAAATGATAATTACCCCCAT | [X]VDTTIK (SEQ ID NO: 5545) |
| | AAATTGATAATTATCCCACCCC | **LPP*IDNYPTP(SEQ ID NO: 5799) |
| 400 | TGTTGATACAACCATAAAAGGATAATTACCCCCAT | [X]VDTTIKG (SEQ ID NO: 5547) |
| | AAATTGATAATTATCCCACCCC | *LPP*IDNYPTP(SEQ ID NO: 5799) |
| 401 | TGTTGATACAACCATAAAATCATAATTACCCCCAT | [X]VDTTIKS (SEQ ID NO: 5548) |
| | AAATTGATAATTATCCCACCCC | *LPP*IDNYPTP(SEQ ID NO: 5799) |
| 402 | TGTTGATACAACCATAAAATGATCATTACCCCCAT | [X]VDTTIK (SEQ ID NO: 5545) *SLPP (SEQ ID NO: |
| | AAATTGATAATTATCCCACCCC | 5556) *IDNYPTP(SEQ ID NO: 5799) |
| 403 | TGTTGATACAACCATAAAAGGATCATTACCCCCAT | [X]VDTTIKGSLPP (SEQ ID NO: 5557) |
| | AAATTGATAATTATCCCACCCC | *IDNYPTP(SEQ ID NO: 5799) |
| 404 | TGTTGATACAACCATAAAATCATCATTACCCCCAT | [X]VDTTIKSSLPP (SEQ ID NO: 5558) |
| | AAATTGATAATTATCCCACCCC | *IDNYPTP(SEQ ID NO: 5799) |
| 405 | TGTTGATACAACCATAAAATGATAATTACCCCCAT | [X]VDTTIK (SEQ ID NO: 5545) **LPPSIDNYPTP |
| | CAATTGATAATTATCCCACCCC | (SEQ ID NO: 5804) |
| 406 | TGTTGATACAACCATAAAAGGATAATTACCCCCAT | [X]VDTTIKG (SEQ ID NO: 5547) |
| | CAATTGATAATTATOCCACCCC | *LPPSIDNYPTP(SEQ ID NO: 5804) |
| 407 | TGTTGATACAACCATAAAATCATAATTACCCCCAT | [X]VDTTIKS (SEQ ID NO: 5548) |
| | CAATTGATAATTATCCCACCCC | *LPPSIDNYPTP(SEQ ID NO: 5804) |
| 408 | TGTTGATACAACCATAAAATGATCATTACCCCCAT | [X]VDTTIK (SEQ ID NO: 5545) |
| | CAATTGATAATTATCCCACCCC | *SLPPSIDNYPTP(SEQ ID NO: 5805) |
| 409 | TGTTGATACAACCATAAAAGGATCATTACCCCCAT | [X]VDTTIKGSLPPSIDNYPTP(SEQ ID NO: 5806) |
| | CAATTGATAATTATCCCACCCC | |
| 410 | TGTTGATACAACCATAAAATCATCATTACCCCCAT | [X]VDTTIKSSLPPSIDNYPTP (SEQ ID NO: 5807) |
| | CAATTGATAATTATCCCACCCC | |
| 411 | TGTTGATACAACCATAAAATGATAATTACACCCAT | [X]VDTTIK (SEQ ID NO: 5545) |
| | AAATTGATAATTCTCACACCCA | **LHP*IDNSHT[Q/H](SEQ ID NO: 5837) |
| 316 | TGTTGATACAACCATAAAAGGATAATTACACCCAT | [X]VDTTIKG (SEQ ID NO: 5547) |
| | AAATTGATAATTATCACACCCA | *LHP*IDNYHT[Q/H] (SEQ ID NO: 5546) |
| 283 | TGTTGATACAACCATAAAATCATAATTACACCCAT | [X]VDTTIKS (SEQ ID NO: 5548) |
| | AAATTGATAATTATCACACCCA | *LHP*IDNYHT[Q/H] (SEQ ID NO: 5546) |
| 318 | TGTTGATACAACCATAAAATGATCATTACACCCAT | [X]VDTTIK (SEQ ID NO: 5545) *SLHP (SEQ ID NO: |
| | AAATTGATAATTATCACACCCA | 5549) *IDNYHT[Q/H] (SEQ ID NO: 5546) |
| 319 | TGTTGATACAACCATAAAAGGATCATTACACCCAT | [X]VDTTIKGSLHP (SEQ ID NO: 5550) |
| | AAATTGATAATTATCACACCCA | *IDNYHT[Q/H] (SEQ ID NO: 5546) |
| 320 | TGTTGATACAACCATAAAATCATCATTACACCCAT | [X]VDTTIKSSLHP (SEQ ID NO: 5551) |
| | AAATTGATAATTATCACACCCA | *IDNYHT[Q/H] (SEQ ID NO: 5546) |
| 321 | TGTTGATACAACCATAAAATGATAATTACACCCAT | [X]VDTTIK (SEQ ID NO: 5545) |
| | CAATTGATAATTATCACACCCA | **LHPSIDNYHT[Q/H] (SEQ ID NO: 5552) |
| 322 | TGTTGATACAACCATAAAAGGATAATTACACCCAT | [X]VDTTIKG (SEQ ID NO: 5547) |
| | CAATTGATAATTATCACACCCA | *LHPSIDNYHT[Q/H] (SEQ ID NO: 5552) |
| 323 | TGTTGATACAACCATAAAATCATAATTACACCCAT | [X]VDTTIKS (SEQ ID NO: 5548) |
| | CAATTGATAATTATCACACCCA | *LHPSIDNYHT[Q/H] (SEQ ID NO: 5552) |
| 324 | TGTTGATACAACCATAAAATGATCATTACACCCAT | [X]VDTTIK (SEQ ID NO: 5545) |
| | CAATTGATAATTATCACACCCA | *SLHPSIDNYHT[Q/H] (SEQ ID NO: 5553) |
| 325 | TGTTGATACAACCATAAAAGGATCATTACACCCAT | [X]VDTTIKGSLHPSIDNYHT[Q/H] (SEQ ID NO: |
| | CAATTGATAATTATCACACCCA | 5554) |
| 326 | TGTTGATACAACCATAAAATCATCATTACACCCAT | [X]VDTTIKSSLHPSIDNYHT[Q/H] (SEQ ID NO: |
| | CAATTGATAATTATCACACCCA | 5555) |
| 327 | TGTTGATACAACCATAAAATGATAATTACCCCCAT | [X]VDTTIK (SEQ ID NO: 5545) |
| | AAATTGATAATTATCACACCCA | **LPP*IDNYHT[Q/H] (SEQ ID NO: 5546) |
| 328 | TGTTGATACAACCATAAAAGGATAATTACCCCCAT | [X]VDTTIKG (SEQ ID NO: 5547) |
| | AAATTGATAATTATCACACCCA | *LPP*IDNYHT[Q/H] (SEQ ID NO: 5546) |
| 329 | TGTTGATACAACCATAAAATCATAATTACCCCCAT | [X]VDTTIKS (SEQ ID NO: 5548) |
| | AAATTGATAATTATCACACCCA | *LPP*IDNYHT[Q/H] (SEQ ID NO: 5546) |
| 330 | TGTTGATACAACCATAAAATGATCATTACCCCCAT | [X]VDTTIK (SEQ ID NO: 5545) *SLPP (SEQ ID NO: |
| | AAATTGATAATTATCACACCCA | 5556) *IDNYHT[Q/H] (SEQ ID NO: 5546) |
| 331 | TGTTGATACAACCATAAAAGGATCATTACCCCCAT | [X]VDTTIKGSLPP (SEQ ID NO: 5557) |
| | AAATTGATAATTATCACACCCA | *IDNYHT[Q/H] (SEQ ID NO: 5546) |
| 332 | TGTTGATACAACCATAAAATCATCATTACCCCCAT | [X]VDTTIKSSLPP (SEQ ID NO: 5558) |
| | AAATTGATAATTATCACACCCA | *IDNYHT[Q/H] (SEQ ID NO: 5546) |
| 333 | TGTTGATACAACCATAAAATGATAATTACCCCCAT | [X]VDTTIK (SEQ ID NO: 5545) |
| | CAATTGATAATTATCACACCCA | **LPPSIDNYHT[Q/H] (SEQ ID NO: 5559) |
| 334 | TGTTGATACAACCATAAAAGGATAATTACCCCCAT | [X]VDTTIKG (SEQ ID NO: 5547) |
| | CAATTGATAATTATCACACCCA | *LPPSIDNYHT[Q/H] (SEQ ID NO: 5559) |
| 335 | TGTTGATACAACCATAAAATCATAATTACCCCCAT | [X]VDTTIKS (SEQ ID NO: 5548) |
| | CAATTGATAATTATCACACCCA | *LPPSIDNYHT[Q/H] (SEQ ID NO: 5559) |
| 336 | TGTTGATACAACCATAAAATGATCATTACCCCCAT | [X]VDTTIK (SEQ ID NO: 5545) |
| | CAATTGATAATTATCACACCCA | *SLPPSIDNYHT[Q/H] (SEQ ID NO: 5560) |
| 337 | TGTTGATACAACCATAAAAGGATCATTACCCCCAT | [X]VDTTIKGSLPPSIDNYHT[Q/H] (SEQ ID NO: |
| | CAATTGATAATTATCACACCCA | 5561) |
| 338 | TGTTGATACAACCATAAAATCATCATTACCCCCAT | [X]VDTTIKSSLPPSIDNYHT[Q/H] (SEQ ID NO: |
| | CAATTGATAATTATCACACCCA | 5562 |
| 339 | TGTTGATACAACCATAAAATGATAATTACACCCAT | [X]VDTTIK (SEQ ID NO: 5545) |
| | AAATTGATAATTATCCCACCCA | **LHP*IDNYPT[Q/H] (SEQ ID NO: 5563) |
| 340 | TGTTGATACAACCATAAAAGGATAATTACACCCAT | [X]VDTTIKG (SEQ ID NO: 5547) |
| | AAATTGATAATTATCCCACCCA | *LHP*IDNYPT[Q/H] (SEQ ID NO: 5563) |
| 341 | TGTTGATACAACCATAAAATCATAATTACACCCAT | [X]VDTTIKS (SEQ ID NO: 5548) |
| | AAATTGATAATTATCCCACCCA | *LHP*IDNYPT[Q/H] (SEQ ID NO: 5563) |
| 342 | TGTTGATACAACCATAAAATGATCATTACACCCAT | [X]VDTTIK (SEQ ID NO: 5545) *SLHP (SEQ ID NO: |
| | AAATTGATAATTATCCCACCCA | 5549) *IDNYPT[Q/H] (SEQ ID NO: 5563) |
| 343 | TGTTGATACAACCATAAAAGGATCATTACACCCAT | [X]VDTTIKGSLHP (SEQ ID NO: 5550) |
| | AAATTGATAATTATCCCACCCA | *IDNYPT[Q/H] (SEQ ID NO: 5563) |
| 344 | TGTTGATACAACCATAAAATCATCATTACACCCAT | [X]VDTTIKSSLHP (SEQ ID NO: 5551) |
| | AAATTGATAATTATCCCACCCA | *IDNYPT[Q/H] (SEQ ID NO: 5563) |
| 345 | TGTTGATACAACCATAAAATGATAATTACACCCAT | [X]VDTTIK (SEQ ID NO: 5545) |
| | CAATTGATAATTATCCCACCCA | **LHPSIDNYPT[Q/H] (SEQ ID NO: 5564) |
| 346 | TGTTGATACAACCATAAAAGGATAATTACACCCAT | [X]VDTTIKG (SEQ ID NO: 5547) |
| | CAATTGATAATTATCCCACCCA | *LHPSIDNYPT[Q/H] (SEQ ID NO: 5564) |
| 347 | TGTTGATACAACCATAAAATCATAATTACACCCAT | [X]VDTTIKS (SEQ ID NO: 5548) |
| | CAATTGATAATTATCCCACCCA | *LHPSIDNYPT[Q/H] (SEQ ID NO: 5564) |
| 348 | TGTTGATACAACCATAAAATGATCATTACACCCAT | [X]VDTTIK (SEQ ID NO: 5545) |
| | CAATTGATAATTATCCCACCCA | *SLHPSIDNYPT[Q/H] (SEQ ID NO: 5565) |
| 349 | TGTTGATACAACCATAAAAGGATCATTACACCCAT | [X]VDTTIKGSLHPSIDNYPT[Q/H] (SEQ ID NO: |
| | CAATTGATAATTATCCCACCCA | 5566) |
| 350 | TGTTGATACAACCATAAAATCATCATTACACCCAT | [X]VDTTIKSSLHPSIDNYPT[Q/H] (SEQ ID NO: |
| | CAATTGATAATTATCCCACCCA | 5567) |
| 351 | TGTTGATACAACCATAAAATGATAATTACACCCAT | [X]VDTTIK (SEQ ID NO: 5545) **LHP*IDNYHTP |
| | AAATTGATAATTATCACACCCC | (SEQ ID NO: 5486) |
| 352 | TGTTGATACAACCATAAAAGGATAATTACACCCAT | [X]VDTTIKG (SEQ ID NO: 5547) *LHP*IDNYHTP |
| | AAATTGATAATTATCACACCCC | (SEQ ID NO: 5486) |
| 353 | TGTTGATACAACCATAAAATCATAATTACACCCAT | [X]VDTTIKS (SEQ ID NO: 5548) *LHP*IDNYHTP |
| | AAATTGATAATTATCACACCCC | (SEQ ID NO: 5486) |
| 354 | TGTTGATACAACCATAAAATGATCATTACACCCAT | [X]VDTTIK (SEQ ID NO: 5545) *SLHP (SEQ ID NO: |
| | AAATTGATAATTATCACACCCC | 5549) *IDNYHTP (SEQ ID NO: 5486) |
| 355 | TGTTGATACAACCATAAAAGGATCATTACACCCAT | [X]VDTTIKGSLHP (SEQ ID NO: 5550) *IDNYHTP |
| | AAATTGATAATTATCACACCCC | (SEQ ID NO: 5486) |
| 356 | TGTTGATACAACCATAAAATCATCATTACACCCAT | [X]VDTTIKSSLHP (SEQ ID NO: 5551) *IDNYHTP |
| | AAATTGATAATTATCACACCCC | (SEQ ID NO: 5486) |
| 357 | TGTTGATACAACCATAAAATGATAATTACACCCAT | [X]VDTTIK (SEQ ID NO: 5545) **LHPSIDNYHTP |
| | CAATTGATAATTATCACACCCC | (SEQ ID NO: 5568) |
| 358 | TGTTGATACAACCATAAAAGGATAATTACACCCAT | [X]VDTTIKG (SEQ ID NO: 5547) *LHPSIDNYHTP |
| | CAATTGATAATTATCACACCCC | (SEQ ID NO: 5568) |
| 359 | TGTTGATACAACCATAAAATCATAATTACACCCAT | [X]VDTTIKS (SEQ ID NO: 5548) *LHPSIDNYHTP |
| | CAATTGATAATTATCACACCCC | (SEQ ID NO: 5568) |
| 360 | TGTTGATACAACCATAAAATGATCATTACACCCAT | [X]VDTTIK (SEQ ID NO: 5545) *SLHPSIDNYHTP |
| | CAATTGATAATTATCACACCCC | (SEQ ID NO: 5569) |
| 361 | TGTTGATACAACCATAAAAGGATCATTACACCCAT | [X]VDTTIKGSLHPSIDNYHTP (SEQ ID NO: 5570) |
| | CAATTGATAATTATCACACCCC | |
| 362 | TGTTGATACAACCATAAAATCATCATTACACCCAT | [X]VDTTIKSSLHPSIDNYHTP (SEQ ID NO: 5571) |
| | CAATTGATAATTATCACACCCC | |
| 363 | TGTTGATACAACCATAAAATGATAATTACCCCCAT | [X]VDTTIK (SEQ ID NO: 5545) |
| | AAATTGATAATTATCCCACCCA | **LPP*IDNYPT[Q/H] (SEQ ID NO: 5563) |
| 364 | TGTTGATACAACCATAAAAGGATAATTACCCCCAT | [X]VDTTIKG (SEQ ID NO: 5547) |
| | AAATTGATAATTATCCCACCCA | *LPP*IDNYPT[Q/H] (SEQ ID NO: 5563) |
| 365 | TGTTGATACAACCATAAAATCATAATTACCCCCAT | [X]VDTTIKS (SEQ ID NO: 5548) |
| | AAATTGATAATTATCCCACCCA | *LPP*IDNYPT[Q/H] (SEQ ID NO: 5563) |
| 366 | TGTTGATACAACCATAAAATGATCATTACCCCCAT | [X]VDTTIK (SEQ ID NO: 5545) *SLPP (SEQ ID NO: |
| | AAATTGATAATTATCCCACCCA | 5556) *IDNYPT[Q/H] (SEQ ID NO: 5563) |
| 367 | TGTTGATACAACCATAAAAGGATCATTACCCCCAT | [X]VDTTIKGSLPP (SEQ ID NO: 5557) |
| | AAATTGATAATTATCCCACCCA | *IDNYPT[Q/H] (SEQ ID NO: 5563) |
| 368 | TGTTGATACAACCATAAAATCATCATTACCCCCAT | [X]VDTTIKSSLPP (SEQ ID NO: 5558) |
| | AAATTGATAATTATCCCACCCA | *IDNYPT[Q/H] (SEQ ID NO: 5563) |
| 369 | TGTTGATACAACCATAAAATGATAATTACCCCCAT | [X]VDTTIK (SEQ ID NO: 5545) |
| | CAATTGATAATTATCCCACCCA | **LPPSIDNYPT[Q/H] (SEQ ID NO: 5572) |
| 370 | TGTTGATACAACCATAAAAGGATAATTACCCCCAT | [X]VDTTIKG (SEQ ID NO: 5547) |
| | CAATTGATAATTATCCCACCCA | *LPPSIDNYPT[Q/H] (SEQ ID NO: 5572) |
| 371 | TGTTGATACAACCATAAAATCATAATTACCCCCAT | [X]VDTTIKS (SEQ ID NO: 5548) |
| | CAATTGATAATTATCCCACCCA | *LPPSIDNYPT[Q/H] (SEQ ID NO: 5572) |
| 372 | TGTTGATACAACCATAAAATGATCATTACCCCCAT | [X]VDTTIK (SEQ ID NO: 5545) |
| | CAATTGATAATTATCCCACCCA | *SLPPSIDNYPT[Q/H] (SEQ ID NO: 5792) |
| 373 | TGTTGATACAACCATAAAAGGATCATTACCCCCAT | [X]VDTTIKGSLPPSIDNYPT[Q/H] (SEQ ID NO: |
| | CAATTGATAATTATCCCACCCA | 5793) |
| 374 | TGTTGATACAACCATAAAATCATCATTACCCCCAT | [X]VDTTIKSSLPPSIDNYPT[Q/H] (SEQ ID NO: |
| | CAATTGATAATTATCCCACCCA | 5794) |
| 375 | TGTTGATACAACCATAAAATGATAATTACCCCCAT | [X]VDTTIK (SEQ ID NO: 5545) **LPP*IDNYHTP |
| | AAATTGATAATTATCACACCCC | (SEQ ID NO: 5486) |
| 376 | TGTTGATACAACCATAAAAGGATAATTACCCCCAT | [X]VDTTIKG (SEQ ID NO: 5547) *LPP*IDNYHTP |
| | AAATTGATAATTATCACACCCC | (SEQ ID NO: 5486) |
| 377 | TGTTGATACAACCATAAAATCATAATTACCCCCAT | [X]VDTTIKS (SEQ ID NO: 5548) *LPP*IDNYHTP |
| | AAATTGATAATTATCACACCCC | (SEQ ID NO: 5486) |
| 378 | TGTTGATACAACCATAAAATGATCATTACCCCCAT | [X]VDTTIK (SEQ ID NO: 5545) *SLPP (SEQ ID NO: |
| | AAATTGATAATTATCACACCCC | 5556) *IDNYHTP (SEQ ID NO: 5486) |
| 379 | TGTTGATACAACCATAAAAGGATCATTACCCCCAT | [X]VDTTIKGSLPP (SEQ ID NO: 5557) *IDNYHTP |
| | AAATTGATAATTATCACACCCC | (SEQ ID NO: 5486) |
| 380 | TGTTGATACAACCATAAAATCATCATTACCCCCAT | [X]VDTTIKSSLPP (SEQ ID NO: 5558) *IDNYHTP |
| | AAATTGATAATTATCACACCCC | (SEQ ID NO: 5486) |
| 381 | TGTTGATACAACCATAAAATGATAATTACCCCCAT | [X]VDTTIK (SEQ ID NO: 5545) |
| | CAATTGATAATTATCACACCCC | **LPPSIDNYHTP(SEQ ID NO: 5795) |
| 382 | TGTTGATACAACCATAAAAGGATAATTACCCCCAT | [X]VDTTIKG (SEQ ID NO: 5547) |
| | CAATTGATAATTATCACACCCC | *LPPSIDNYHTP(SEQ ID NO: 5795) |
| 383 | TGTTGATACAACCATAAAATCATAATTACCCCCAT | [X]VDTTIKS (SEQ ID NO: 5548) |
| | CAATTGATAATTATCACACCCC | *LPPSIDNYHTP(SEQ ID NO: 5795) |
| 384 | TGTTGATACAACCATAAAATGATCATTACCCCCAT | [X]VDTTIK (SEQ ID NO: 5545) |
| | CAATTGATAATTATCACACCCC | *SLPPSIDNYHTP(SEQ ID NO: 5796) |
| 385 | TGTTGATACAACCATAAAAGGATCATTACCCCCAT | [X]VDTTIKGSLPPSIDNYHTP(SEQ ID NO: 5797) |
| | CAATTGATAATTATCACACCCC | |
| 386 | TGTTGATACAACCATAAAATCATCATTACCCCCAT | [X]VDTTIKSSLPPSIDNYHTP(SEQ ID NO: 5798) |
| | CAATTGATAATTATCACACCCC | |
| 387 | TGTTGATACAACCATAAAATGATAATTACACCCAT | [X]VDTTIK (SEQ ID NO: 5545) |
| | AAATTGATAATTATCCCACCCC | **LHP*IDNYPTP(SEQ ID NO: 5799) |
| 388 | TGTTGATACAACCATAAAAGGATAATTACACCCAT | [X]VDTTIKG (SEQ ID NO: 5547) |
| | AAATTGATAATTATCCCACCCC | *LHP*IDNYPTP(SEQ ID NO: 5799) |
| 389 | TGTTGATACAACCATAAAATCATAATTACACCCAT | [X]VDTTIKS (SEQ ID NO: 5548) |
| | AAATTGATAATTATCCCACCCC | *LHP*IDNYPTP(SEQ ID NO: 5799) |
| 390 | TGTTGATACAACCATAAAATGATCATTACACCCAT | [X]VDTTIK (SEQ ID NO: 5545) *SLHP (SEQ ID NO: |
| | AAATTGATAATTATCCCACCCC | 5549) *IDNYPTP(SEQ ID NO: 5799) |
| 391 | TGTTGATACAACCATAAAAGGATCATTACACCCAT | [X]VDTTIKGSLHP (SEQ ID NO: 5550) |
| | AAATTGATAATTATCCCACCCC | *IDNYPTP(SEQ ID NO: 5799) |
| 392 | TGTTGATACAACCATAAAATCATCATTACACCCAT | [X]VDTTIKSSLHP (SEQ ID NO: 5551) |
| | AAATTGATAATTATCCCACCCC | *IDNYPTP(SEQ ID NO: 5799) |
| 393 | TGTTGATACAACCATAAAATGATAATTACACCCAT | [X]VDTTIK (SEQ ID NO: 5545) |
| | CAATTGATAATTATCCCACCCC | **LHPSIDNYPTP(SEQ ID NO: 5800) |
| 394 | TGTTGATACAACCATAAAAGGATAATTACACCCAT | [X]VDTTIKG (SEQ ID NO: 5547) |
| | CAATTGATAATTATOCCACCCC | *LHPSIDNYPTP(SEQ ID NO: 5800) |
| 395 | TGTTGATACAACCATAAAATCATAATTACACCCAT | [X]VDTTIKS (SEQ ID NO: 5548) |
| | CAATTGATAATTATCCCACCCC | *LHPSIDNYPTP(SEQ ID NO: 5800) |
| 396 | TGTTGATACAACCATAAAATGATCATTACACCCAT | [X]VDTTIK (SEQ ID NO: 5545) |
| | CAATTGATAATTATCCCACCCC | *SLHPSIDNYPTP(SEQ ID NO: 5801) |
| 397 | TGTTGATACAACCATAAAAGGATCATTACACCCAT | [X]VDTTIKGSLHPSIDNYPTP (SEQ ID NO: 5802) |
| | CAATTGATAATTATCCCACCCC | |
| 398 | TGTTGATACAACCATAAAATCATCATTACACCCAT | [X]VDTTIKSSLHPSIDNYPTP (SEQ ID NO: 5803) |
| | CAATTGATAATTATCCCACCCC | |
| 399 | TGTTGATACAACCATAAAATGATAATTACCCCCAT | [X]VDTTIK (SEQ ID NO: 5545) |
| | AAATTGATAATTATCCCACCCC | **LPP*IDNYPTP(SEQ ID NO: 5799) |
| 400 | TGTTGATACAACCATAAAAGGATAATTACCCCCAT | [X]VDTTIKG (SEQ ID NO: 5547) |
| | AAATTGATAATTATCCCACCCC | *LPP*IDNYPTP(SEQ ID NO: 5799) |
| 401 | TGTTGATACAACCATAAAATCATAATTACCCCCAT | [X]VDTTIKS (SEQ ID NO: 5548) |
| | AAATTGATAATTATCCCACCCC | *LPP*IDNYPTP(SEQ ID NO: 5799) |
| 402 | TGTTGATACAACCATAAAATGATCATTACCCCCAT | [X]VDTTIK (SEQ ID NO: 5545) *SLPP (SEQ ID NO: |
| | AAATTGATAATTATCCCACCCC | 5556) *IDNYPTP(SEQ ID NO: 5799) |
| 403 | TGTTGATACAACCATAAAAGGATCATTACCCCCAT | [X]VDTTIKGSLPP (SEQ ID NO: 5557) |
| | AAATTGATAATTATCCCACCCC | *IDNYPTP(SEQ ID NO: 5799) |
| 404 | TGTTGATACAACCATAAAATCATCATTACCCCCAT | [X]VDTTIKSSLPP (SEQ ID NO: 5558) |
| | AAATTGATAATTATCCCACCCC | *IDNYPTP(SEQ ID NO: 5799) |
| 405 | TGTTGATACAACCATAAAATGATAATTACCCCCAT | [X]VDTTIK (SEQ ID NO: 5545) |
| | CAATTGATAATTATCCCACCCC | ** LPPSIDNYPTP(SEQ ID NO: 5804) |
| 406 | TGTTGATACAACCATAAAAGGATAATTACCCCCAT | [X]VDTTIKG (SEQ ID NO: 5547) |
| | CAATTGATAATTATCCCACCCC | *LPPSIDNYPTP(SEQ ID NO: 5804) |
| 407 | TGTTGATACAACCATAAAATCATAATTACCCCCAT | [X]VDTTIKS (SEQ ID NO: 5548) |
| | CAATTGATAATTATCCCACCCC | *LPPSIDNYPTP(SEQ ID NO: 5804) |
| 408 | TGTTGATACAACCATAAAATGATCATTACCCCCAT | [X]VDTTIK (SEQ ID NO: 5545) |
| | CAATTGATAATTATCCCACCCC | *SLPPSIDNYPTP(SEQ ID NO: 5805) |
| 409 | TGTTGATACAACCATAAAAGGATCATTACCCCCAT | [X]VDTTIKGSLPPSIDNYPTP (SEQ ID NO: 5806) |
| | CAATTGATAATTATCCCACCCC | |
| 410 | TGTTGATACAACCATAAAATCATCATTACCCCCAT | [X]VDTTIKSSLPPSIDNYPTP(SEQ ID NO: 5807) |
| | CAATTGATAATTATCCCACCCC | |
| 507 | TGTTGATACAACCATAAAATGATAATTCACCCATA | [X]VDTTIK (SEQ ID NO: 5545) **FTHKLIIITPT |
| | AATTGATAATTATCACACCCAC | (SEQ ID NO: 5808) |
| 508 | TGTTGATACAACCATAAAAGGATAATTCACCCATA | [X]VDTTIKG (SEQ ID NO: 5547) *FTHKLIIITPT |
| | AATTGATAATTATCACACCCAC | (SEQ ID NO: 5808) |
| 509 | TGTTGATACAACCATAAAATCATAATTCACCCATA | [X]VDTTIKS (SEQ ID NO: 5548) *FTHKLIITPT |
| | AATTGATAATTATCACACCCAC | (SEQ ID NO: 5808) |
| 510 | TGTTGATACAACCATAAAATGATCATTCACCCATA | [X]VDTTIK (SEQ ID NO: 5545) *SFTHKLIIITPT |
| | AATTGATAATTATCACACCCAC | (SEQ ID NO: 5809) |
| 511 | TGTTGATACAACCATAAAAGGATCATTCACCCATA | [X]VDTTIKGSFTHKLIIITPT (SEQ ID NO: 5810) |
| | AATTGATAATTATCACACCCAC | |
| 512 | TGTTGATACAACCATAAAATCATCATTCACCCATA | [X]VDTTIKSSFTHKLIIITPT (SEQ ID NO: 5811) |
| | AATTGATAATTATCACACCCAC | |
| 513 | TGTTGATACAACCATAAAATGATAATTCACCCCTA | [X]VDTTIK (SEQ ID NO: 5545) **FTPKLIITPT |
| | AATTGATAATTATCACACCCAC | (SEQ ID NO: 5812) |
| 514 | TGTTGATACAACCATAAAAGGATAATTCACCCCTA | [X]VDTTIKG (SEQ ID NO: 5547) *FTPKLIITPT |
| | AATTGATAATTATCACACCCAC | (SEQ ID NO: 5812) |
| 515 | TGTTGATACAACCATAAAATCATAATTCACCCCTA | [X]VDTTIKS (SEQ ID NO: 5548) *FTPKLIIITPT |
| | AATTGATAATTATCACACCCAC | (SEQ ID NO: 5812) |
| 516 | TGTTGATACAACCATAAAATGATCATTCACCCCTA | [X]VDTTIK (SEQ ID NO: 5545) *SFTPKLIIITPT |
| | AATTGATAATTATCACACCCAC | (SEQ ID NO: 5813) |
| 517 | TGTTGATACAACCATAAAAGGATCATTCACCCCTA | [X]VDTTIKGSFTPKLIHITPT (SEQ ID NO: 5814) |
| | AATTGATAATTATCACACCCAC | |
| 518 | TGTTGATACAACCATAAAATCATCATTCACCCCTA | [X]VDTTIKSSFTPKLIIITPT (SEQ ID NO: 5815) |
| | AATTGATAATTATCACACCCAC | |
| 18 | TGTTGATACAACCATAAAATGATAATTACACCCAT | [X]VDTTIK (SEQ ID NO: 5545) |
| | AAATTGATAATTATCACACCCA | **LHP*IDNYHT[Q/H] (SEQ ID NO: 5546) |
| 520 | TGTTAATACAACCATAAAATGATAATTACACCCAT | [X]VNTTIK(SEQ ID NO: |
| | AAATTGATAATTATCACACCCA | 5816)**LHP*IDNYHT[Q/H] (SEQ ID NO: 5546) |
| 521 | TGTTGTTACAACCATAAAATGATAATTACACCCAT | [X]VVTTIK(SEQ ID NO: |
| | AAATTGATAATTATCACACCCA | 5817)**LHP*IDNYHT[Q/H] (SEQ ID NO: 5546) |
| 522 | TGTTGCTACAACCATAAAATGATAATTACACCCAT | [X]VATTIK(SEQ ID NO: |
| | AAATTGATAATTATCACACCCA | 5818)**LHP*IDNYHT[Q/H] (SEQ ID NO: 5546) |
| 523 | TGTTGGTACAACCATAAAATGATAATTACACCCAT | [X]VGTTIK(SEQ ID NO: |
| | AAATTGATAATTATCACACCCA | 5819)**LHP*IDNYHT[Q/H] (SEQ ID NO: 5546) |
| 277 | TGTTGATACAACCATACAATGATAATTACACCCAT | [X]VDTTIQ(SEQ ID NO: |
| | AAATTGATAATTATCACACCCA | 5820)**LHP*IDNYHT[Q/H] (SEQ ID NO: 5546) |
| 525 | TGTTGATACAACCATAATATGATAATTACACCCAT | [X]VDTTII(SEQ ID NO: 5821)**LHP*IDNYHT[Q/H] |
| | AAATTGATAATTATCACACCCA | (SEQ ID NO: 5546) |
| 526 | TGTTGATACAACCATAACATGATAATTACACCCAT | [X]VDTTIT(SEQ ID NO: 5822)**LHP*IDNYHT[Q/H] |
| | AAATTGATAATTATCACACCCA | (SEQ ID NO: 5546) |
| 278 | TGTTGATACAACCATAAATTGATAATTACACCCAT | [X]VDTTIN(SEQ ID NO: |
| | AAATTGATAATTATCACACCCA | 5823)**LHP*IDNYHT[Q/H] (SEQ ID NO: 5546) |
| 279 | TGTTGATACAACCATAAACTGATAATTACACCCAT | [X]VDTTIN**LHP*IDNYHT[Q/H] (SEQ ID NO: |
| | AAATTGATAATTATCACACCCA | 5546) |
| 316 | TGTTGATACAACCATAAAAGGATAATTACACCCAT | [X]VDTTIKG (SEQ ID NO: 5547) |
| | AAATTGATAATTATCACACCCA | *LHP*IDNYHT[Q/H] (SEQ ID NO: 5546) |
| 282 | TGTTGATACAACCATAAAATTATAATTACACCCAT | [X]VDTTIKL(SEQ ID NO: |
| | AAATTGATAATTATCACACCCA | 5824)*LHP*IDNYHT[Q/H] (SEQ ID NO: 5546) |
| 283 | TGTTGATACAACCATAAAATCATAATTACACCCAT | [X]VDTTIKS (SEQ ID NO: 5548) |
| | AAATTGATAATTATCACACCCA | *LHP*IDNYHT[Q/H] (SEQ ID NO: 5546) |
| 532 | TGTTGATACAACCATAAAATGACAATTACACCCAT | [X]VDTTIK (SEQ ID NO: 5545) *QLHP(SEQ ID NO: |
| | AAATTGATAATTATCACACCCA | 5825)*IDNYHT[Q/H] (SEQ ID NO: 5546) |
| 533 | TGTTGATACAACCATAAAATGATTATTACACCCAT | [X]VDTTIK (SEQ ID NO: 5545) *LLHP(SEQ ID NO: |
| | AAATTGATAATTATCACACCCA | 5826)*IDNYHT[Q/H] (SEQ ID NO: 5546) |
| 318 | TGTTGATACAACCATAAAATGATCATTACACCCAT | [X]VDTTIK (SEQ ID NO: 5545) *SLHP (SEQ ID NO: |
| | AAATTGATAATTATCACACCCA | 5549) *IDNYHT[Q/H] (SEQ ID NO: 5546) |
| 535 | TGTTGATACAACCATAAAATGATAATTAAACCCAT | [X]VDTTIK (SEQ ID NO: 5545) |
| | AAATTGATAATTATCACACCCA | **LNP*IDNYHT[Q/H] (SEQ ID NO: 5546) |
| 536 | TGTTGATACAACCATAAAATGATAATTACTCCCAT | [X]VDTTIK (SEQ ID NO: 5545) |
| | AAATTGATAATTATCACACCCA | **LLP*IDNYHT[Q/H] (SEQ ID NO: 5546) |
| 327 | TGTTGATACAACCATAAAATGATAATTACCCCCAT | [X]VDTTIK (SEQ ID NO: 5545) |
| | AAATTGATAATTATCACACCCA | **LPP*IDNYHT[Q/H] (SEQ ID NO: 5546) |
| 538 | TGTTGATACAACCATAAAATGATAATTACAACCAT | [X]VDTTIK (SEQ ID NO: 5545) |
| | AAATTGATAATTATCACACCCA | **LQP*IDNYHT[Q/H] (SEQ ID NO: 5546) |
| 539 | TGTTGATACAACCATAAAATGATAATTACAGCCAT | [X]VDTTIK (SEQ ID NO: 5545) |
| | AAATTGATAATTATCACACCCA | **LQP*IDNYHT[Q/H] (SEQ ID NO: 5546) |
| 540 | TGTTGATACAACCATAAAATGATAATTACACCCAC | [X]VDTTIK (SEQ ID NO: 5545) |
| | AAATTGATAATTATCACACCCA | **LHPQIDNYHT[Q/H](SEQ ID NO: 5827) |
| 541 | TGTTGATACAACCATAAAATGATAATTACACCCAT | [X]VDTTIK (SEQ ID NO: 5545) |
| | TAATTGATAATTATCACACCCA | **LHPLIDNYHT[Q/H](SEQ ID NO: 5828) |
| 321 | TGTTGATACAACCATAAAATGATAATTACACCCAT | [X]VDTTIK (SEQ ID NO: 5545) |
| | CAATTGATAATTATCACACCCA | **LHPSIDNYHT[Q/H] (SEQ ID NO: 5552) |
| 543 | TGTTGATACAACCATAAAATGATAATTACACCCAT | [X]VDTTIK (SEQ ID NO: 5545) |
| | AAATTAATAATTATCACACCCA | **LHP*INNYHT[Q/H](SEQ ID NO: 5829) |
| 544 | TGTTGATACAACCATAAAATGATAATTACACCCAT | [X]VDTTIK (SEQ ID NO: 5545) |
| | AAATTGTTAATTATCACACCCA | **LHP*IVNYHT[Q/H](SEQ ID NO: 5830) |
| 545 | TGTTGATACAACCATAAAATGATAATTACACCCAT | [X]VDTTIK (SEQ ID NO: 5545) |
| | AAATTGCTAATTATCACACCCA | **LHP*IANYHT[Q/H](SEQ ID NO: 5831) |
| 546 | TGTTGATACAACCATAAAATGATAATTACACCCAT | [X]VDTTIK (SEQ ID NO: 5545) |
| | AAATTGGTAATTATCACACCCA | **LHP*IGNYHT[Q/H](SEQ ID NO: 5832) |
| 547 | TGTTGATACAACCATAAAATGATAATTACACCCAT | [X]VDTTIK (SEQ ID NO: 5545) |
| | AAATTGATATTTATCACACCCA | **LHP*IDIYHT[Q/H](SEQ ID NO: 5833) |
| 548 | TGTTGATACAACCATAAAATGATAATTACACCCAT | [X]VDTTIK (SEQ ID NO: 5545) |
| | AAATTGATACTTATCACACCCA | **LHP*IDTYHT[Q/H](SEQ ID NO: 5834) |
| 549 | TGTTGATACAACCATAAAATGATAATTACACCCAT | [X]VDTTIK (SEQ ID NO: 5545) |
| | AAATTGATAGTTATCACACCCA | **LHP*IDSYHT[Q/H](SEQ ID NO: 5835) |
| 550 | TGTTGATACAACCATAAAATGATAATTACACCCAT | [X]VDTTIK (SEQ ID NO: 5545) |
| | AAATTGATAATAATCACACCCA | **LHP*IDNNHT[Q/H](SEQ ID NO: 5836) |
| 411 | TGTTGATACAACCATAAAATGATAATTACACCCAT | [X]VDTTIK (SEQ ID NO: 5545) |
| | AAATTGATAATTCTCACACCCA | **LHP*IDNSHT[Q/H](SEQ ID NO: 5837) |
| 552 | TGTTGATACAACCATAAAATGATAATTACACCCAT | [X]VDTTIK (SEQ ID NO: 5545) |
| | AAATTGATAATTATAACACCCA | **LHP*IDNYNT[Q/H](SEQ ID NO: 5838) |
| 553 | TGTTGATACAACCATAAAATGATAATTACACCCAT | [X]VDTTIK (SEQ ID NO: 5545) |
| | AAATTGATAATTATCTCACCCA | **LHP*IDNYLT[Q/H](SEQ ID NO: 5839) |
| 339 | TGTTGATACAACCATAAAATGATAATTACACCCAT | [X]VDTTIK (SEQ ID NO: 5545) |
| | AAATTGATAATTATCCCACCCA | **LHP*IDNYPT[Q/H] (SEQ ID NO: 5563) |
| 294 | TGTTGATACAACCATAAAATGATAATTACACCCAT | [X]VDTTIK (SEQ ID NO: 5545) |
| | AAATTGATAATTATCAAACCCA | **LHP*IDNYQT[Q/H](SEQ ID NO: 5840) |
| 556 | TGTTGATACAACCATAAAATGATAATTACACCCAT | [X]VDTTIK (SEQ ID NO: 5545) |
| | AAATTGATAATTATCAGACCCA | **LHP*IDNYQT[Q/H](SEQ ID NO: 5840) |
| 557 | TGTTGATACAACCATAAAATGATTATTACACCCAT | [X]VDTTIK (SBQ ID NO: 5545) |
| | TAATTGATAATTATCACACCCA | *LLHPLIDNYHT[Q/H](SEQ ID NO: 5841) |
| 558 | TGTTGATACAACCATAAAAGGATTATTACACCCAT | [X]VDTTIKGLLHPLIDNYHT[Q/H] (SEQ ID NO: |
| | TAATTGATAATTATCACACCCA | 5842) |
| 559 | TGTTGATACAACCATAAAATTATTATTACACCCAT | [X]VDTTIKLLLHPLIDNYHT[Q/H] (SEQ ID NO: |
| | TAATTGATAATTATCACACCCA | 5843) |
| 560 | TGTTGATACAACCATAAAATCATTATTACACCCAT | [X]VDTTIKSLLHPLIDNYHT[Q/H] (SEQ ID NO: |
| | TAATTGATAATTATCACACCCA (551) | 5844) |

Frame 3

| | | |
|---|---|---|
| 18 | TGTTGATACAACCATAAAATGATAATTACACCCAT | [M/L/V]LIQP(SEQ ID NO: |
| | AAATTGATAATTATCACACCCA | 5724)*NDNYTHKLIIITP[X](SEQ ID NO: 5748) |
| 565 | TGTTGATACAACCATCAAATGATAATTACACCCAT | [M/L/V]LIQPSNDNYTHKLIIITP[X] (SEQ ID NO: |
| | AAATTGATAATTATCACACCCA | 5747) |
| 566 | TGTTGATACAACCATAAAATGATAATTACACCCCT | [M/L/V]LIQP(SEQ ID NO: |
| | AAATTGATAATTATCACACCCA | 5724)*NDNYTPKLIIITP[X] (SEQ ID NO: 5739) |
| 567 | TGTTGATACAACCATCAAATGATAATTACACCCCT | [M/L/V]LIQPSNDNYTPKLIIITP[X] (SEQ ID NO: |
| | AAATTGATAATTATCACACCCA | 5749) |
| 568 | TGTTGATACAACCATAAAATGATAATTCCACCCAT | [M/L/V]LIQP(SEQ ID NO: |
| | AAATTGATAATTATCACACCCA | 5724)*NDNSTHKLIIITP[X] (SEQ ID NO: 5736) |
| 569 | TGTTGATACAACCATCAAATGATAATTCCACCCAT | [M/L/V]LIQPSNDNSTHKLIIITP[X] (SEQ ID NO: |
| | AAATTGATAATTATCACACCCA | 5750) |
| 570 | TGTTGATACAACCATAAAATGATAATTCCACCCCT | [M/L/V]LIQP(SEQ ID NO: |
| | AAATTGATAATTATCACACCCA | 5724)*NDNSTPKLIIITP[X] (SEQ ID NO: 5751) |
| 571 | TGTTGATACAACCATCAAATGATAATTCCACCCCT | [M/L/V]LIQPSNDNSTPKLIIITP[X] (SEQ ID NO: |
| | AAATTGATAATTATCACACCCA | 5752) |
| 572 | TGTTGATACAACCATAAAATGGTAATTACACCCAT | [M/L/V]LIQP(SEQ ID NO: |
| | AAATTGATAATTATCACACCCA | 5724)*NGNYTHKLIIITP[X](SEQ ID NO: 5731) |
| 573 | TGTTGATACAACCATCAAATGGTAATTACACCCAT | [M/L/V]LIQPSNGNYTHKLIIITP[X] (SEQ ID NO: |
| | AAATTGATAATTATCACACCCA | 5358) |
| 574 | TGTTGATACAACCATAAAATGGTAATTACACCCCT | [M/L/V]LIQP(SEQ ID NO: |
| | AAATTGATAATTATCACACCCA | 5724)*NGNYTPKLIIITP[X] (SEQ ID NO: 5753) |
| 575 | TGTTGATACAACCATCAAATGGTAATTACACCCCT | [M/L/V]LIQPSNGNYTPKLIIITP[X] (SEQ ID NO: |
| | AAATTGATAATTATCACACCCA | 5754) |
| 576 | TGTTGATACAACCATAAAATGGTAATTCCACCCAT | [M/L/V]LIQP(SEQ ID NO: |
| | AAATTGATAATTATCACACCCA | 5724)*NGNSTHKLIIITP[X] (SEQ ID NO: 5755) |
| 577 | TGTTGATACAACCATCAAATGGTAATTCCACCCAT | [M/L/V]LIQPSNGNSTHKLIUITP[X] (SEQ ID NO: |
| | AAATTGATAATTATCACACCCA | 5756) |
| 578 | TGTTGATACAACCATAAAATGGTAATTCCACCCCT | [M/L/V]LIQP(SEQ ID NO: |
| | AAATTGATAATTATCACACCCA | 5724)*NGNSTPKLIIITP[X] (SEQ ID NO: 5757) |
| 579 | TGTTGATACAACCATCAAATGGTAATTCCACCCCT | [M/L/V]LIQPSNGNSTPKLIIITP[X] (SEQ ID NO: |
| | AAATTGATAATTATCACACCCA | 5758) |
| 580 | TGTTGATACAACCATAAAATGATAATTACACCCAT | [M/L/V]LIQP(SEQ ID NO: |
| | ACATTGATAATTATCACACCCA | 5724)*NDNYTHTLIIITP[X](SEQ ID NO: 5743) |
| 581 | TGTTGATACAACCATCAAATGATAATTACACCCAT | [M/L/V]LIQPSNDNYTHTLIIITP[X] (SEQ ID NO: |
| | ACATTGATAATTATCACACCCA | 5759) |
| 582 | TGTTGATACAACCATAAAATGATAATTACACCCCT | [M/L/V]LIQP(SEQ ID NO: |
| | ACATTGATAATTATCACACCCA | 5724)*NDNYTPTLIIITP[X] (SEQ ID NO: 5760) |
| 583 | TGTTGATACAACCATCAAATGATAATTACACCCCT | [M/L/V]LIQPSNDNYTPTLIIITP[X] (SEQ ID NO: |
| | ACATTGATAATTATCACACCCA | 5761) |
| 584 | TGTTGATACAACCATAAAATGATAATTCCACCCAT | [M/L/V]LIQP(SEQ ID NO: |
| | ACATTGATAATTATCACACCCA | 5724)*NDNSTHTLIIITP[X] (SEQ ID NO: 5762) |
| 585 | TGTTGATACAACCATCAAATGATAATTCCACCCAT | [M/L/V]LIQPSNDNSTHTLIITP[X] (SEQ ID NO: |
| | ACATTGATAATTATCACACCCA | 5763) |
| 586 | TGTTGATACAACCATAAAATGATAATTCCACCCCT | [M/L/V]LIQP(SEQ ID NO: |
| | ACATTGATAATTATCACACCCA | 5724)*NDNSTPTLIIITP[X] (SEQ ID NO: 5764) |
| 587 | TGTTGATACAACCATCAAATGATAATTCCACCCCT | [M/L/V]LIQPSNDNSTPTLIIITP[X] (SEQ ID NO: |
| | ACATTGATAATTATCACACCCA | 5765) |
| 588 | TGTTGATACAACCATAAAATGGTAATTACACCCAT | [M/L/V]LIQP(SEQ ID NO: |
| | ACATTGATAATTATCACACCCA | 5724)*NGNYTHTLIIITP[X] (SEQ ID NO: 5766) |
| 589 | TGTTGATACAACCATCAAATGGTAATTACACCCAT | [M/L/V]LIQPSNGNYTHTLIIITP[X] (SEQ ID NO: |
| | ACATTGATAATTATCACACCCA | 5767) |
| 590 | TGTTGATACAACCATAAAATGGTAATTACACCCCT | [M/L/V]LIQP(SEQ ID NO: |
| | ACATTGATAATTATCACACCCA | 5724)*NGNYTPTLIIITP[X] (SEQ ID NO: 5768) |
| 591 | TGTTGATACAACCATCAAATGGTAATTACACCCCT | [M/L/V]LIQPSNGNYTPTLIIITP[X] (SEQ ID NO: |
| | ACATTGATAATTATCACACCCA | 5769) |
| 592 | TGTTGATACAACCATAAAATGGTAATTCCACCCAT | [M/L/V]LIQP(SEQ ID NO: |
| | ACATTGATAATTATCACACCCA | 5724)*NGNSTHTLIIITP[X] (SEQ ID NO: 5770) |
| 593 | TGTTGATACAACCATCAAATGGTAATTCCACCCAT | [M/L/V]LIQPSNGNSTHTLIIITP[X] (SEQ ID NO: |
| | ACATTGATAATTATCACACCCA | 5771) |
| 594 | TGTTGATACAACCATAAAATGGTAATTCCACCCCT | [M/L/V]LIQP(SEQ ID NO: |
| | ACATTGATAATTATCACACCCA | 5724)*NGNSTPTLIIITP[X] (SEQ ID NO: 5772) |
| 595 | TGTTGATACAACCATCAAATGGTAATTCCACCCCT | [M/L/V]LIQPSNGNSTPTLIIITP[X] (SEQ ID NO: |
| | ACATTGATAATTATCACACCCA | 5773) |
| 596 | TGTTGATACCACCATAAAATGATAATTACACCCAT | [M/L/V]LIPP(SEQ ID NO: |
| | AAATTGATAATTATCACACCCA | 5774)*NDNYTHKLIIITP[X](SEQ ID NO: 5748) |
| 597 | TGTTGATACCACCATCAAATGATAATTACACCCAT | [M/L/V]LIPPSNDNYTHKLIIITP[X] (SEQ ID NO: |
| | AAATTGATAATTATCACACCCA | 5775) |
| 598 | TGTTGATACCACCATAAAATGATAATTACACCCCT | [M/L/V]LIPP(SEQ ID NO: |
| | AAATTGATAATTATCACACCCA | 5774)*NDNYTPKLIIITP[X](SEQ ID NO: 5739) |
| 599 | TGTTGATACCACCATCAAATGATAATTACACCCCT | [M/L/V]LIPPSNDNYTPKLIIITP[X] (SEQ ID NO: |
| | AAATTGATAATTATCACACCCA | 5776) |
| 600 | TGTTGATACCACCATAAAATGATAATTCCACCCAT | [M/L/V]LIPP(SEQ ID NO: |
| | AAATTGATAATTATCACACCCA | 5774)*NDNSTHKLIIITP[X](SEQ ID NO: 5736) |
| 601 | TGTTGATACCACCATCAAATGATAATTCCACCCAT | [M/L/V]LIPPSNDNSTHKLIIITP[X] (SEQ ID NO: |
| | AAATTGATAATTATCACACCCA | 5777) |
| 602 | TGTTGATACCACCATAAAATGATAATTCCACCCCT | [M/L/V]LIPP(SEQ ID NO: |
| | AAATTGATAATTATCACACCCA | 5774)*NDNSTPKLIIITP[X] (SEQ ID NO: 5751) |
| 603 | TGTTGATACCACCATCAAATGATAATTCCACCCCT | [M/L/V]LIPPSNDNSTPKLIIITP[X] (SEQ ID NO: |
| | AAATTGATAATTATCACACCCA | 5778) |
| 604 | TGTTGATACCACCATAAAATGGTAATTACACCCAT | [M/L/V]LIPP(SEQ ID NO: |
| | AAATTGATAATTATCACACCCA | 5774)*NGNYTHKLIIITP[X](SEQ ID NO: 5731) |
| 605 | TGTTGATACCACCATCAAATGGTAATTACACCCAT | [M/L/V]LIPPSNGNYTHKLIIITP[X] (SEQ ID NO: |
| | AAATTGATAATTATCACACCCA | 5779) |
| 606 | TGTTGATACCACCATAAAATGGTAATTACACCCCT | [M/L/V]LIPP(SEQ ID NO: |
| | AAATTGATAATTATCACACCCA | 5774)*NGNYTPKLIIITP[X] (SEQ ID NO: 5753) |
| 607 | TGTTGATACCACCATCAAATGGTAATTACACCCCT | [M/L/V]LIPPSNGNYTPKLIIITP[X] (SEQ ID NO: |
| | AAATTGATAATTATCACACCCA | 5780) |
| 608 | TGTTGATACCACCATAAAATGGTAATTCCACCCAT | [M/L/V]LIPP(SEQ ID NO: |
| | AAATTGATAATTATCACACCCA | 5774)*NGNSTHKLIIITP[X] (SEQ ID NO: 5755) |
| 609 | TGTTGATACCACCATCAAATGGTAATTCCACCCAT | [M/L/V]LIPPSNGNSTHKLIIITP[X] (SEQ ID NO: |
| | AAATTGATAATTATCACACCCA | 5781) |
| 610 | TGTTGATACCACCATAAAATGGTAATTCCACCCCT | [M/L/V]LIPP(SEQ ID NO: |
| | AAATTGATAATTATCACACCCA | 5774)*NGNSTPKLIIITP[X] |
| 611 | TGTTGATACCACCATCAAATGGTAATTCCACCCCT | [M/L/V]LIPPSNGNSTPKLIIITP[X] (SEQ ID NO: |
| | AAATTGATAATTATCACACCCA | 5782) |
| 612 | TGTTGATACCACCATAAAATGATAATTACACCCAT | [M/L/V]LIPP(SEQ ID NO: |
| | ACATTGATAATTATCACACCCA | 5774)*NDNYTHTLIIITP[X](SEQ ID NO: 5743) |
| 613 | TGTTGATACCACCATCAAATGATAATTACACCCAT | [M/L/V]LIPPSNDNYTHTLIIITP[X] (SEQ ID NO: |
| | ACATTGATAATTATCACACCCA | 5783) |
| 614 | TGTTGATACCACCATAAAATGATAATTACACCCCT | [M/L/V]LIPP(SEQ ID NO: |
| | ACATTGATAATTATCACACCCA | 5774)*NDNYTPTLIIITP[X] (SEQ ID NO: 5760) |
| 615 | TGTTGATACCACCATCAAATGATAATTACACCCCT | [M/L/V]LIPPSNDNYTPTLIIITP[X] (SEQ ID NO: |
| | ACATTGATAATTATCACACCCA | 5784) |
| 616 | TGTTGATACCACCATAAAATGATAATTCCACCCAT | [M/L/V]LIPP(SEQ ID NO: |
| | ACATTGATAATTATCACACCCA | 5774)*NDNSTHTLIIITP[X] (SEQ ID NO: 5762) |
| 617 | TGTTGATACCACCATCAAATGATAATTCCACCCAT | [M/L/V]LIPPSNDNSTHTLIIITP[X] (SEQ ID NO: |
| | ACATTGATAATTATCACACCCA | 5785) |
| 618 | TGTTGATACCACCATAAAATGATAATTCCACCCCT | [M/L/V]LIPP(SEQ ID NO: 5774)*NDNSTPTLIIITP[X] |
| | ACATTGATAATTATCACACCCA | (SEQ ID NO: 5764) |
| 619 | TGTTGATACCACCATCAAATGATAATTCCACCCCT | [M/L/V]LIPPSNDNSTPTLIIITP[X] (SEQ ID NO: |
| | ACATTGATAATTATCACACCCA | 5786) |
| 620 | TGTTGATACCACCATAAAATGGTAATTACACCCAT | [M/L/V]LIPP(SEQ ID NO: |
| | ACATTGATAATTATCACACCCA | 5774)*NGNYTHTLIIITP[X] (SEQ ID NO: 5766) |
| 621 | TGTTGATACCACCATCAAATGGTAATTACACCCAT | [M/L/V]LIPPSNGNYTHTLIIITP[X] (SEQ ID NO: |
| | ACATTGATAATTATCACACCCA | 5787) |
| 622 | TGTTGATACCACCATAAAATGGTAATTACACCCCT | [M/L/V]LIPP(SEQ ID NO: |
| | ACATTGATAATTATCACACCCA | 5774)*NGNYTPTLIIITP[X] (SEQ ID NO: 5768) |
| 623 | TGTTGATACCACCATCAAATGGTAATTACACCCCT | [M/L/V]LIPPSNGNYTPTLIIITP[X] (SEQ ID NO: |
| | ACATTGATAATTATCACACCCA | 5788) |
| 624 | TGTTGATACCACCATAAAATGGTAATTCCACCCAT | [M/L/V]LIPP(SEQ ID NO: |
| | ACATTGATAATTATCACACCCA | 5774)*NGNSTHTLIIITP[X] (SEQ ID NO: 5770) |
| 625 | TGTTGATACCACCATCAAATGGTAATTCCACCCAT | [M/L/V]LIPPSNGNSTHTLIIITP[X] (SEQ ID NO: |
| | ACATTGATAATTATCACACCCA | 5789) |
| 626 | TGTTGATACCACCATAAAATGGTAATTCCACCCCT | [M/L/V]LIPP(SEQ ID NO: 5774)*NGNSTPTLIIITP[X] |
| | ACATTGATAATTATCACACCCA | (SEQ ID NO: 5772) |
| 627 | TGTTGATACCACCATCAAATGGTAATTCCACCCCT | [M/L/V]LIPPSNGNSTPTLIIITP[X] (SEQ ID NO: |
| | ACATTGATAATTATCACACCCA | 5790) |
| 18 | TGTTGATACAACCATAAAATGATAATTACACCCAT | [M/L/V]LIQP(SEQ ID NO: |
| | AAATTGATAATTATCACACCCA | 5724)*NDNYTHKLIIITP[X](SEQ ID NO: 5748) |
| 629 | TGTTGATACTACCATAAAATGATAATTACACCCAT | [M/L/V]LILP(SEQ ID NO: |
| | AAATTGATAATTATCACACCCA | 5791)*NDNYTHKLIIITP[X](SEQ ID NO: 5748) |
| 596 | TGTTGATACCACCATAAAATGATAATTACACCCAT | [M/L/V]LIPP(SEQ ID NO: |
| | AAATTGATAATTATCACACCCA | 5774)*NDNYTHKLIIITP[X](SEQ ID NO: 5748) |
| 631 | TGTTGATACAACCACAAAATGATAATTACACCCAT | [M/L/V]LIQPQNDNYTHKLIIITP[X] (SEQ ID NO: |
| | AAATTGATAATTATCACACCCA | 5745) |
| 632 | TGTTGATACAACCATTAAATGATAATTACACCCAT | [M/L/V]LIQPLNDNYTHKLIIITP[X] (SEQ ID NO: |
| | AAATTGATAATTATCACACCCA | 5746) |
| 565 | TGTTGATACAACCATCAAATGATAATTACACCCAT | [M/L/V]LIQPSNDNYTHKLIIITP[X] (SEQ ID NO: |
| | AAATTGATAATTATCACACCCA | 5747) |
| 278 | TGTTGATACAACCATAAATTGATAATTACACCCAT | [M/L/V]LIQP(SEQ ID NO: |
| | AAATTGATAATTATCACACCCA | 5724)*IDNYTHKLIIITP[X](SEQ ID NO: 5725) |
| 279 | TGTTGATACAACCATAAACTGATAATTACACCCAT | [M/L/V]LIQP(SEQ ID NO: |
| | AAATTGATAATTATCACACCCA | 5724)*TDNYTHKLIIITP[X](SEQ ID NO: 5726) |
| 280 | TGTTGATACAACCATAAAGTGATAATTACACCCAT | [M/L/V]LIQP(SEQ ID NO: |
| | AAATTGATAATTATCACACCCA | 5724)*SDNYTHKLIIITP[X](SEQ ID NO: 5727) |
| 284 | TGTTGATACAACCATAAAATAATAATTACACCCAT | [M/L/V]LIQP(SEQ ID NO: |
| | AAATTGATAATTATCACACCCA | 5724)*NNNYTHKLIIITP[X](SEQ ID NO: 5728) |
| 638 | TGTTGATACAACCATAAAATGTTAATTACACCCAT | [M/L/V]LIQP(SEQ ID NO: |
| | AAATTGATAATTATCACACCCA | 5724)*NVNYTHKLIIITP[X](SEQ ID NO: 5729) |
| 639 | TGTTGATACAACCATAAAATGCTAATTACACCCAT | [M/L/V]LIQP(SEQ ID NO: |
| | AAATTGATAATTATCACACCCA | 5724)*NANYTHKLIIITP[X](SEQ ID NO: 5730) |
| 572 | TGTTGATACAACCATAAAATGGTAATTACACCCAT | [M/L/V]LIQP(SEQ ID NO: |
| | AAATTGATAATTATCACACCCA | 5724)*NGNYTHKLIIITP[X](SEQ ID NO: 5731) |
| 641 | TGTTGATACAACCATAAAATGATATTTACACCCAT | [M/L/V]LIQP(SEQ ID NO: |
| | AAATTGATAATTATCACACCCA | 5724)*NDIYTHKLIIITP[X](SEQ ID NO: 5732) |
| 642 | TGTTGATACAACCATAAAATGATACTTACACCCAT | [M/L/V]LIQP(SEQ ID NO: |
| | AAATTGATAATTATCACACCCA | 5724)*NDTYTHKLIIITP[X](SEQ ID NO: 5733) |
| 643 | TGTTGATACAACCATAAAATGATAGTTACACCCAT | [M/L/V]LIQP(SEQ ID NO: |
| | AAATTGATAATTATCACACCCA | 5724)*NDSYTHKLIIITP[X](SEQ ID NO: 5734) |
| 644 | TGTTGATACAACCATAAAATGATAATAACACCCAT | [M/L/V]LIQP(SEQ ID NO: |
| | AAATTGATAATTATCACACCCA | 5724)*NDNNTHKLIIITP[X](SEQ ID NO: 5735) |
| 568 | TGTTGATACAACCATAAAATGATAATTCCACCCAT | [M/L/V]LIQP(SEQ ID NO: |
| | AAATTGATAATTATCACACCCA | 5724)*NDNSTHKLIIITP[X](SEQ ID NO: 5736) |
| 646 | TGTTGATACAACCATAAAATGATAATTACACCAAT | [M/L/V]LIQP(SEQ ID NO: |
| | AAATTGATAATTATCACACCCA | 5724)*NDNYTNKLIIITP[X](SEQ ID NO: 5737) |
| 647 | TGTTGATACAACCATAAAATGATAATTACACCCTT | [M/L/V]LIQP(SEQ ID NO: |
| | AAATTGATAATTATCACACCCA | 5724)*NDNYTLKLIIITP[X](SEQ ID NO: 5738) |
| 566 | TGTTGATACAACCATAAAATGATAATTACACCCCT | [M/L/V]LIQP(SEQ ID NO: |
| | AAATTGATAATTATCACACCCA | 5724)*NDNYTPKLIIITP[X](SEQ ID NO: 5739) |
| 649 | TGTTGATACAACCATAAAATGATAATTACACCCAA | [M/L/V]LIQP(SEQ ID NO: |
| | AAATTGATAATTATCACACCCA | 5724)*NDNYTQKLIIITP[X](SEQ ID NO: 5740) |
| 650 | TGTTGATACAACCATAAAATGATAATTACACCCAG | [M/L/V]LIQP(SEQ ID NO: |
| | AAATTGATAATTATCACACCCA | 5724)*NDNYTQKLIIITP[X](SEQ ID NO: 5740) |
| 321 | TGTTGATACAACCATAAAATGATAATTACACCCAT | [M/L/V]LIQP(SEQ ID NO: |
| | CAATTGATAATTATCACACCCA | 5724)*NDNYTHQLIIITP[X](SEQ ID NO: 5741) |
| 652 | TGTTGATACAACCATAAAATGATAATTACACCCAT | [M/L/V]LIQP(SEQ ID NO: |
| | ATATTGATAATTATCACACCCA | 5724)*NDNYTHILIIITP[X](SEQ ID NO: 5742) |
| 580 | TGTTGATACAACCATAAAATGATAATTACACCCAT | [M/L/V]LIQP(SEQ ID NO: |
| | ACATTGATAATTATCACACCCA | 5724)*NDNYTHTLIIITP[X](SEQ ID NO: 5743) |
| 285 | TGTTGATACAACCATAAAATGATAATTACACCCAT | [M/L/V]LIQP(SEQ ID NO: |
| | AATTTGATAATTATCACACCCA | 5724)*NDNYTHNLIIITP[X](SEQ ID NO: 5744) |
| 286 | TGTTGATACAACCATAAAATGATAATTACACCCAT | [M/L/V]LIQP(SEQ ID NO: |
| | AACTTGATAATTATCACACCCA | 5724)*NDNYTHNLIIITP[X](SEQ ID NO: 5744) |
| 656 | TGTTGATACAACCATTAAATGGTAATTACACCCAT | [M/L/V]LIQPLNGNYTHKLIIITP[X] (SEQ ID NO: |
| | AAATTGATAATTATCACACCCA | 5703) |
| 657 | TGTTGATACAACCATTAAATGATAATTCCACCCAT | [M/L/V]LIQPLNDNSTHKLIIITP[X] (SEQ ID NO: |
| | AAATTGATAATTATCACACCCA | 5704) |
| 658 | TGTTGATACAACCATTAAATGATAATTACACCCAA | [M/L/V]LIQPLNDNYTQKLIIITP[X] (SEQ ID NO: |
| | AAATTGATAATTATCACACCCA | 5705) |
| 659 | TGTTGATACAACCATTAAATGATAATTACACCCAT | [M/L/V]LIQPLNDNYTHILIIITP[X] (SEQ ID NO: |
| | ATATTGATAATTATCACACCCA | 5706) |
| 660 | TGTTGATACAACCATTAAATGATAATTACACCCAT | [M/L/V]LIQPLNDNYTHNLIIITP[X] (SEQ ID NO: |
| | AATTTGATAATTATCACACCCA | 5707) |
| 661 | TGTTGATACAACCATTAAATAATAATTCCACCCAT | [M/L/V]LIQPLNNNSTHKLIIITP[X] (SEQ ID NO: |
| | AAATTGATAATTATCACACCCA | 5708) |
| 662 | TGTTGATACAACCATTAAATGTTAATTCCACCCAT | [M/L/V]LIQPLNVNSTHKLIIITP[X] (SEQ ID NO: |
| | AAATTGATAATTATCACACCCA | 5709) |
| 663 | TGTTGATACAACCATTAAATGCTAATTCCACCCAT | [M/L/V]LIQPLNANSTHKLIIITP[X] (SEQ ID NO: |
| | AAATTGATAATTATCACACCCA | 5710) |
| 664 | TGTTGATACAACCATTAAATGGTAATTCCACCCAT | [M/L/V]LIQPLNGNSTHKLIIITP[X] (SEQ ID NO: |
| | AAATTGATAATTATCACACCCA | 5711) |
| 665 | TGTTGATACAACCATTAAATGATAATTCCACCAAT | [M/L/V]LIQPLNDNSTNKLIIITP[X] (SEQ ID NO: |
| | AAATTGATAATTATCACACCCA | 5712) |
| 666 | TGTTGATACAACCATTAAATGATAATTCCACCCTT | [M/L/V]LIQPLNDNSTLKLIIITP[X] (SEQ ID NO: |
| | AAATTGATAATTATCACACCCA | 5713) |
| 667 | TGTTGATACAACCATTAAATGATAATTCCACCCCT | [M/L/V]LIQPLNDNSTPKLIIITP[X] (SEQ ID NO: |
| | AAATTGATAATTATCACACCCA | 5714) |
| 668 | TGTTGATACAACCATTAAATGATAATTCCACCCAA | [M/L/V]LIQPLNDNSTQKLIIITP[X] (SEQ ID NO: |
| | AAATTGATAATTATCACACCCA | 5715) |
| 669 | TGTTGATACAACCATTAAATGATAATTCCACCCAG | [M/L/V]LIQPLNDNSTQKLIIITP[X] (SEQ ID NO: |
| | AAATTGATAATTATCACACCCA | 5715) |
| 670 | TGTTGATACAACCATTAAATGATAATTCCACCCAT | [M/L/V]LIQPLNDNSTHQLIIITP[X] (SEQ ID NO: |
| | CAATTGATAATTATCACACCCA | 5716) |
| 671 | TGTTGATACAACCATTAAATGATAATTCCACCCAT | [M/L/V]LIQPLNDNSTHILIIITP[X] (SEQ ID NO: |
| | ATATTGATAATTATCACACCCA | 5717) |
| 672 | TGTTGATACAACCATTAAATGATAATTCCACCCAT | [M/L/V]LIQPLNDNSTHTLIIITP[X] (SEQ ID NO: |
| | ACATTGATAATTATCACACCCA | 5718) |
| 673 | TGTTGATACAACCATTAAATGATAATTCCACCCAT | [M/L/V]LIQPLNDNSTHNLIIITP[X] (SEQ ID NO: |
| | AATTTGATAATTATCACACCCA | 5719) |
| 674 | TGTTGATACAACCATTAAATGATAATTCCACCCAT | [M/L/V]LIQPLNDNSTHNLIIITP[X] (SEQ ID NO: |
| | AACTTGATAATTATCACACCCA | 5719) |
| 664 | TGTTGATACAACCATTAAATGGTAATTCCACCCAT | [M/L/V]LIQPLNGNSTHKLIIITP[X] (SEQ ID NO: |
| | AAATTGATAATTATCACACCCA | 5711) |
| 668 | TGTTGATACAACCATTAAATGATAATTCCACCCAA | [M/L/V]LIQPLNDNSTQKLIIITP[X] (SEQ ID NO: |
| | AAATTGATAATTATCACACCCA | 5715) |
| 671 | TGTTGATACAACCATTAAATGATAATTCCACCCAT | [M/L/V]LIQPLNDNSTHILIIITP[X] (SEQ ID NO: |
| | ATATTGATAATTATCACACCCA | 5717) |
| 678 | TGTTGATACAACCATTAAATGGTAATTCCACCCAT | [M/L/V]LIQPLNGNSTHILIIITP[X] (SEQ ID NO: |
| | ATATTGATAATTATCACACCCA | 5720) |
| 679 | TGTTGATACAACCATTAAATGATAATTCCACCCAA | [M/L/V]LIQPLNDNSTQILIIITP[X] (SEQ ID NO: |
| | ATATTGATAATTATCACACCCA | 5721) |
| 680 | TGTTGATACAACCATTAAATGGTAATTCCACCCAA | [M/L/V]LIQPLNGNSTQKLIIITP[X] (SEQ ID NO: |
| | AAATTGATAATTATCACACCCA | 5722 |
| 681 | TGTTGATACAACCATTAAATGGTAATTCCACCCAA | [M/L/V]LIQPLNGNSTQILIIITP[X] (SEQ ID NO: |
| | ATATTGATAATTATCACACCCA | 5360) |

Frame 4

| | | |
|---|---|---|
| 682 | TGGGTGTGATAATTATCAATTTATGGGTGTAATTA | WV**LSIYGCNYHFMVVST(SEQ ID NO: 5678) |
| | TCATTTTATGGTTGTATCAACA | |
| 683 | GGGGTGTGATAATTATCAATTTATGGGTGTAATTA | GV**LSIYGCNYHFMVVST(SEQ ID NO: 5678) |
| | TCATTTTATGGTTGTATCAACA | |
| 684 | TTGGTGTGATAATTATCAATTTATGGGTGTAATTAT | LV**LSIYGCNYHFMVVST(SEQ ID NO: 5678) |
| | CATTTTATGGTTGTATCAACA | |
| 685 | TCGGTGTGATAATTATCAATTTATGGGTGTAATTA | SV**LSIYGCNYHFMVVST(SEQ ID NO: 5678) |
| | TCATTTTATGGTTGTATCAACA | |
| 686 | TGGGTGGGATAATTATCAATTTATGGGTGTAATTA | WVG*LSIYGCNYHEMVVST(SEQ ID NO: 5678) |
| | TCATTTTATGGTTGTATCAACA | |
| 687 | TGGGTGTTATAATTATCAATTTATGGGTGTAATTAT | WVL*LSIYGCNYHFMVVST(SEQ ID NO: 5678) |
| | CATTTTATGGTTGTATCAACA | |
| 688 | TGGGTGTCATAATTATCAATTTATGGGTGTAATTA | WVS*LSIYGCNYHFMVVST(SEQ ID NO: 5678) |
| | TCATTTTATGGTTGTATCAACA | |
| 689 | TGGGTGTGACAATTATCAATTTATGGGTGTAATTA | WV*QLSIYGCNYHFMVVST(SEQ ID NO: 5679) |
| | TCATTTTATGGTTGTATCAACA | |
| 690 | TGGGTGTGATTATTATCAATTTATGGGTGTAATTAT | WV*LLSIYGCNYHFMVVST(SEQ ID NO: 5680) |
| | CATTTTATGGTTGTATCAACA | |
| 691 | TGGGTGTGATCATTATCAATTTATGGGTGTAATTA | WV*SLSIYGCNYHFMVVST(SEQ ID NO: 5681) |
| | TCATTTTATGGTTGTATCAACA | |
| 692 | TGGGTGTGATAATTATCAATTAATGGGTGTAATTA | WV**LSINGCNYHFMVVST(SEQ ID NO: 5682) |
| | TCATTTTATGGTTGTATCAACA | |
| 693 | TGGGTGTGATAATTATCAATTTCTGGGTGTAATTA | WV**LSISGCNYHFMVVST (SEQ ID NO: 5683) |
| | TCATTTTATGGTTGTATCAACA | |
| 694 | TGGGTGTGATAATTATCAATTTATGGGAGTAATTA | WV**LSIYGSNYHFMVVST(SEQ ID NO: 5684) |
| | TCATTTTATGGTTGTATCAACA | |
| 695 | TGGGTGTGATAATTATCAATTTATGGGGGTAATTA | WV**LSIYGGNYHFMVVST(SEQ ID NO: 5685) |
| | TCATTTTATGGTTGTATCAACA | |
| 696 | TGGGTGTGATAATTATCAATTTATGGGTCTAATTA | WV**LSIYGSNYHFMVVST(SEQ ID NO: 5684) |
| | TCATTTTATGGTTGTATCAACA | |
| 697 | TGGGTGTGATAATTATCAATTTATGGGTGTATTTAT | WV**LSIYGCIYHFMVVST(SEQ ID NO: 5686) |
| | CATTTTATGGTTGTATCAACA | |
| 698 | TGGGTGTGATAATTATCAATTTATGGGTGTACTTA | WV**LSIYGCTYHFMVVST(SEQ ID NO: 5687) |
| | TCATTTTATGGTTGTATCAACA | |
| 699 | TGGGTGTGATAATTATCAATTTATGGGTGTAGTTA | WV**LSIYGCSYHFMVVST(SEQ ID NO: 5688) |
| | TCATTTTATGGTTGTATCAACA | |
| 700 | TGGGTGTGATAATTATCAATTTATGGGTGTAATAA | WV**LSIYGCNNHPMVVST(SEQ ID NO: 5689) |
| | TCATTTTATGGTTGTATCAACA | |
| 701 | TGGGTGTGATAATTATCAATTTATGGGTGTAATTC | WV**LSIYGCNSHFMVVST(SEQ ID NO: 5690) |
| | TCATTTTATGGTTGTATCAACA | |
| 702 | TGGGTGTGATAATTATCAATTTATGGGTGTAATTA | WV**LSIYGCNYNFMVVST(SEQ ID NO: 5691) |
| | TAATTTTATGGTTGTATCAACA | |
| 703 | TGGGTGTGATAATTATCAATTTATGGGTGTAATTA | WV**LSIYGCNYLFMVVST(SEQ ID NO: 5692) |
| | TCTTTTTATGGTTGTATCAACA | |
| 704 | TGGGTGTGATAATTATCAATTTATGGGTGTAATTA | WV**LSIYGCNYPFMVVST(SEQ ID NO: 5693) |
| | TCCTTTTATGGTTGTATCAACA | |
| 705 | TGGGTGTGATAATTATCAATTTATGGGTGTAATTA | WV**LSIYGCNYQFMVVST(SEQ ID NO: 5694) |
| | TCAATTTATGGTTGTATCAACA | |
| 706 | TGGGTGTGATAATTATCAATTTATGGGTGTAATTA | WV**LSIYGCNYQFMVVST(SEQ ID NO: 5694) |
| | TCAGTTTATGGTTGTATCAACA | |
| 707 | TGGGTGTGATAATTATCAATTTATGGGTGTAATTA | WV**LSIYGCNYHLMVVST(SEQ ID NO: 5695) |
| | TCATCTTATGGTTGTATCAACA | |
| 708 | TGGGTGTGATAATTATCAATTTATGGGTGTAATTA | WV**LSIYGCNYHIMVVST(SEQ ID NO: 5696) |
| | TCATATTATGGTTGTATCAACA | |
| 709 | TGGGTGTGATAATTATCAATTTATGGGTGTAATTA | WV**LSIYGCNYHVMVVST(SEQ ID NO: 5697) |
| | TCATGTTATGGTTGTATCAACA | |
| 710 | TGGGTGTGATAATTATCAATTTATGGGTGTAATTA | WV**LSIYGCNYHSMVVST(SEQ ID NO: 5698) |
| | TCATTCTATGGTTGTATCAACA | |
| 711 | TGGGTGTGATAATTATCAATTTATGGGTGTAATTA | WV**LSIYGCNYHLMVVST(SEQ ID NO: 5695) |
| | TCATTTAATGGTTGTATCAACA | |
| 712 | TGGGTGTGATAATTATCAATTTATGGGTGTAATTA | WV**LSIYGCNYHLMVVST(SEQ ID NO: 5695) |
| | TCATTTGATGGTTGTATCAACA | |
| 713 | TGGGTGTGATAATTATCAATTTATGGGTGTAATTA | WV**LSIYGCNYHFLVVST(SEQ ID NO: 5699) |
| | TCATTTTTTGGTTGTATCAACA | |
| 714 | TGGGTGTGATAATTATCAATTTATGGGTGTAATTA | WV**LSIYGCNYHFLVVST(SEQ ID NO: 5699) |
| | TCATTTTCTGGTTGTATCAACA | |
| 715 | TGGGTGTGATAATTATCAATTTATGGGTGTAATTA | WV**LSIYGCNYHFVVVST(SEQ ID NO: 5700) |
| | TCATTTTGTGGTTGTATCAACA | |
| 716 | TGGGTGTGATAATTATCAATTTATGGGTGTAATTA | WV**LSIYGCNYHFTVVST(SEQ ID NO: 5701) |
| | TCATTTTACGGTTGTATCAACA | |
| 717 | TGGGTGTGATAATTATCAATTTATGGGTGTAATTA | WV**LSIYGCNYHFIVVST(SEQ ID NO: 5702) |
| | TCATTTTATTGTTGTATCAACA | |
| 718 | TGGGTGTGATAATTATCAATTTATGGGTGTAATTA | WV**LSIYGCNYHFIVVST(SEQ ID NO: 5702) |
| | TCATTTTATCGTTGTATCAACA | |
| 719 | TGGGTGTGATAATTATCAATTTATGGGTGTAATTA | WV**LSIYGCNYHFIVVST(SEQ ID NO: 5702) |
| | TCATTTTATAGTTGTATCAACA | |
| 685 | TCGGTGTGATAATTATCAATTTATGGGTGTAATTA | SV**LSIYGCNYHFMVVST(SEQ ID NO: 5678) |
| | TCATTTTATGGTTGTATCAACA | |
| 721 | TCGGTGTCATAATTATCAATTTATGGGTGTAATTAT | SVS*LSIYGCNYHFMVVST(SEQ ID NO: 5678) |
| | CATTTTATGGTTGTATCAACA | |
| 722 | TCGGTGTCACAATTATCAATTTATGGGTGTAATTA | SVSQLSIYGCNYHFMVVST(SEQ ID NO: 5644) |
| | TCATTTTATGGTTGTATCAACA | |
| 723 | TCGGTGTCATTATTATCAATTTATGGGTGTAATTAT | SVSLLSIYGCNYHFMVVST (SEQ ID NO: 5645) |
| | CATTTTATGGTTGTATCAACA | |
| 724 | TCGGTGTCATCATTATCAATTTATGGGTGTAATTAT | SVSSLSIYGCNYHFMVVST(SEQ ID NO: 5646) |
| | CATTTTATGGTTGTATCAACA | |
| 725 | TCGGTGTCACAATTATCAATTTATGGGTGTAATTA | SVSQLSIYGCNYHFLVVST(SEQ ID NO: 5647) |
| | TCATTTTTTGGTTGTATCAACA | |
| 726 | TCGGTGTCATTATTATCAATTTATGGGTGTAATTAT | SVSLLSIYGCNYHFLVVST(SEQ ID NO: 5648) |
| | CATTTTTTGGTTGTATCAACA | |
| 727 | TCGGTGTCATCATTATCAATTTATGGGTGTAATTAT | SVSSLSIYGCNYHFLVVST(SEQ ID NO: 5649) |
| | CATTTTTTGGTTGTATCAACA | |
| 728 | TCGGTGTCACAATTATCAATTTATGGGTGTAATTA | SVSQLSIYGCNYHLMVVST(SEQ ID NO: 5650) |
| | TCATTTAATGGTTGTATCAACA | |
| 729 | TCGGTGTCATTATTATCAATTTATGGGTGTAATTAT | SVSLLSIYGCNYHLMVVST(SEQ ID NO: 5651) |
| | CATTTAATGGTTGTATCAACA | |
| 730 | TCGGTGTCATCATTATCAATTTATGGGTGTAATTAT | SVSSLSIYGCNYHLMVVST(SEQ ID NO: 5652) |
| | CATTTAATGGTTGTATCAACA | |
| 731 | TCGGTGTCACAATTATCAATTTATGGGTGTAATTA | SVSQLSIYGCNYLFMVVST(SEQ ID NO: 5653) |
| | TCTTTTTATGGTTGTATCAACA | |
| 732 | TCGGTGTCATTATTATCAATTTATGGGTGTAATTAT | SVSLLSIYGCNYLFMVVST(SEQ ID NO: 5654) |
| | CTTTTTATGGTTGTATCAACA | |
| 733 | TCGGTGTCATCATTATCAATTTATGGGTGTAATTAT | SVSSLSIYGCNYLFMVVST(SEQ ID NO: 5655) |
| | CTTTTTATGGTTGTATCAACA | |
| 734 | TCGGTGTCACAATTATCAATTTATGGGTGTAATAA | SVSQLSIYGCNNHFMVVST(SEQ ID NO: 5656) |
| | TCATTTTATGGTTGTATCAACA | |
| 735 | TCGGTGTCATTATTATCAATTTATGGGTGTAATAAT | SVSLLSIYGCNNHFMVVST(SEQ ID NO: 5657) |
| | CATTTTATGGTTGTATCAACA | |
| 736 | TCGGTGTCATCATTATCAATTTATGGGTGTAATAA | SVSSLSIYGCNNHFMVVST(SEQ ID NO: 5658) |
| | TCATTTTATGGTTGTATCAACA | |
| 737 | TCGGTGTCACAATTATCAATTTATGGGTGTATTTAT | SVSQLSIYGCIYHFMVVST(SEQ ID NO: 5659) |
| | CATTTTATGGTTGTATCAACA | |
| 738 | TCGGTGTCATTATTATCAATTTATGGGTGTATTTAT | SVSLLSIYGCIYHFMVVST(SEQ ID NO: 5660) |
| | CATTTTATGGTTGTATCAACA | |
| 739 | TCGGTGTCATCATTATCAATTTATGGGTGTATTTAT | SVSSLSIYGCIYHFMVVST(SEQ ID NO: 5661) |
| | CATTTTATGGTTGTATCAACA | |
| 740 | TCGGTGTCACAATTATCAATTTATGGGGGTAATTA | SVSQLSIYGGNYHFMVVST(SEQ ID NO: 5662) |
| | TCATTTTATGGTTGTATCAACA | |
| 741 | TCGGTGTCATTATTATCAATTTATGGGGGTAATTAT | SVSLLSIYGGNYHFMVVST(SEQ ID NO: 5663) |
| | CATTTTATGGTTGTATCAACA | |
| 742 | TCGGTGTCATCATTATCAATTTATGGGGGTAATTA | SVSSLSIYGGNYHFMVVST(SEQ ID NO: 5664) |
| | TCATTTTATGGTTGTATCAACA | |
| 743 | TCGGTGTCACAATTATCAATTAATGGGTGTAATTA | SVSQLSINGCNYHFMVVST(SEQ ID NO: 5665) |
| | TCATTTTATGGTTGTATCAACA | |
| 744 | TCGGTGTCATTATTATCAATTAATGGGTGTAATTAT | SVSLLSINGCNYHFMVVST(SEQ ID NO: 5666) |
| | CATTTTATGGTTGTATCAACA | |
| 745 | TCGGTGTCATCATTATCAATTAATGGGTGTAATTA | SVSSLSINGCNYHFMVVST (SEQ ID NO: 5667) |
| | TCATTTTATGGTTGTATCAACA | |
| 728 | TCGGTGTCACAATTATCAATTTATGGGTGTAATTA | SVSQLSIYGCNYHLMVVST(SEQ ID NO: 5650) |
| | TCATTTAATGGTTGTATCAACA | |
| 728 | TCGGTGTCATTATTATCAATTTATGGGTGTAATTAT | SVSLLSIYGCNYHLMVVST(SEQ ID NO: 5651) |
| | CATTTAATGGTTGTATCAACA | |
| 730 | TCGGTGTCATCATTATCAATTTATGGGTGTAATTAT | SVSSLSIYGCNYHLMVVST(SEQ ID NO: 5652) |
| | CATTTAATGGTTGTATCAACA | |
| 749 | TCGGTGTCACAATTATCAATTTATGGGTGTAATTA | SVSQLSIYGCNYHILLVVST(SEQ ID NO: 5668) |
| | TCATTTATTGGTTGTATCAACA | |
| 750 | TCGGTGTCATTATTATCAATTTATGGGTGTAATTAT | SVSLLSIYGCNYHLLVVST(SEQ ID NO: 5669) |
| | CATTTATTGGTTGTATCAACA | |
| 751 | TCGGTGTCATCATTATCAATTTATGGGTGTAATTAT | SVSSLSIYGCNYHLLVVST(SEQ ID NO: 5670) |
| | CATTTATTGGTTGTATCAACA | |
| 752 | TCGGTGTCACAATTATCAATTTATGGGTGTAATTA | SVSQLSIYGCNYLLLVVST(SEQ ID NO: 5671) |
| | TCTTTTATTGGTTGTATCAACA | |
| 753 | TCGGTGTCATTATTATCAATTTATGGGTGTAATAAT | SVSLLSIYGCNNHLLVVST(SEQ ID NO: 5672) |
| | CATTTATTGGTTGTATCAACA | |
| 754 | TCGGTGTCATCATTATCAATTTATGGGTGTATTTAT | SVSSLSIYGCIYHLLVVST(SEQ ID NO: 5673) |
| | CATTTATTGGTTGTATCAACA | |
| 755 | TCGGTGTCACAATTATCAATTTATGGGGGTAATTA | SVSQLSIYGGNYHLLVVST(SEQ ID NO: 5674) |
| | TCATTTATTGGTTGTATCAACA | |
| 756 | TCGGTGTCATTATTATCAATTAATGGGTGTAATTAT | SVSLLSINGCNYHLLVVST(SEQ ID NO: 5675) |
| | CATTTATTGGTTGTATCAACA | |
| 757 | TCGGTGTCATCATTATCAATTAATGGGGGTAATAA | SVSSLSINGGNNLLLVVST(SEQ ID NO: 5676) |
| | TCTTTTATTGGTTGTATCAACA | |
| 758 | TCGGTGTCACAATTATCAATTAATGGGGGTATTAA | SVSQLSINGGINLLLVVST(SEQ ID NO: 5677) |
| | TCTTTTATTGGTTGTATCAACA | |

Frame 5

| | | |
|---|---|---|
| 682 | TGGGTGTGATAATTATCAATTTATGGGTGTAATTA | [X]GCDNYQFMGVIIILWLYQ[Q/H] (SEQ ID NO: |
| | TCATTTTATGGTTGTATCAACA | 5613) |
| 760 | TGGGAGTGATAATTATCAATTTATGGGTGTAATTA | [X]GSDNYQFMGVIIILWLYQ[Q/H] (SEQ ID NO: |
| | TCATTTTATGGTTGTATCAACA | 5614) |
| 761 | TGGGGGTGATAATTATCAATTTATGGGTGTAATTA | [X]GGDNYQFMGVIIILWLYQ[Q/H] (SEQ ID NO: |
| | TCATTTTATGGTTGTATCAACA | 5615) |
| 762 | TGGGTCTGATAATTATCAATTTATGGGTGTAATTA | [X]GSDNYQFMGVIIILWLYQ[Q/H] (SEQ ID NO: |
| | TCATTTTATGGTTGTATCAACA | 5614) |
| 763 | TGGGTGTAATAATTATCAATTTATGGGTGTAATTA | [X]GCNNYQFMGVIIILWLYQ[Q/H] (SEQ ID NO: |
| | TCATTTTATGGTTGTATCAACA | 5616) |
| 764 | TGGGTGTGTTAATTATCAATTTATGGGTGTAATTAT | [X]GCVNYQFMGVIIILWLYQ[Q/H] (SEQ ID NO: |
| | CATTTTATGGTTGTATCAACA | 5617) |
| 765 | TGGGTGTGCTAATTATCAATTTATGGGTGTAATTA | [X]GCANYQFMGVIIILWLYQ[Q/H] (SEQ ID NO: |
| | TCATTTTATGGTTGTATCAACA | 5618) |
| 766 | TGGGTGTGGTAATTATCAATTTATGGGTGTAATTA | [X]GCGNYQFMGVIIILWLYQ[Q/H] (SEQ ID NO: |
| | TCATTTTATGGTTGTATCAACA | 5619) |
| 767 | TGGGTGTGATATTTATCAATTTATGGGTGTAATTAT | [X]GCDIYQFMGVIIILWLYQ[Q/H] (SEQ ID NO: |
| | CATTTTATGGTTGTATCAACA | 5620) |
| 768 | TGGGTGTGATACTTATCAATTTATGGGTGTAATTA | [X]GCDTYQFMGVIIILWLYQ[Q/H] (SEQ ID NO: |
| | TCATTTTATGGTTGTATCAACA | 5621) |
| 769 | TGGGTGTGATAGTTATCAATTTATGGGTGTAATTA | [X]GCDSYQFMGVIIILWLYQ[Q/H] (SEQ ID NO: |
| | TCATTTTATGGTTGTATCAACA | 5622) |
| 770 | TGGGTGTGATAATAATCAATTTATGGGTGTAATTA | [X]GCDNNQFMGVIIILWLYQ[Q/H] (SEQ ID NO: |
| | TCATTTTATGGTTGTATCAACA | 5623) |
| 771 | TGGGTGTGATAATTCTCAATTTATGGGTGTAATTA | [X]GCDNSQFMGVIIILWLYQ[Q/H] (SEQ ID NO: |
| | TCATTTTATGGTTGTATCAACA | 5624) |
| 772 | TGGGTGTGATAATTATCTATTTATGGGTGTAATTAT | [X]GCDNYLFMGVIIILWLYQ[Q/H] (SEQ ID NO: |
| | CATTTTATGGTTGTATCAACA | 5625} |
| 773 | TGGGTGTGATAATTATCCATTTATGGGTGTAATTA | [X]GCDNYPFMGVIIILWLYQ[Q/H] (SEQ ID NO: |
| | TCATTTTATGGTTGTATCAACA | 5626) |
| 774 | TGGGTGTGATAATTATCAACTTATGGGTGTAATTA | [X]GCDNYQLMGVIIILWLYQ[Q/H] (SEQ ID NO: |
| | TCATTTTATGGTTGTATCAACA | 5627) |
| 775 | TGGGTGTGATAATTATCAAATTATGGGTGTAATTA | [X]GCDNYQIMGVIIILWLYQ[Q/H] (SEQ ID NO: |
| | TCATTTTATGGTTGTATCAACA | 5628) |
| 776 | TGGGTGTGATAATTATCAAGTTATGGGTGTAATTA | [X]GCDNYQVMGVIIILWLYQ[Q/H] (SEQ ID NO: |
| | TCATTTTATGGTTGTATCAACA | 5629) |
| 777 | TGGGTGTGATAATTATCAATCTATGGGTGTAATTA | [X]GCDNYQSMGVIIILWLYQ[Q/H] (SEQ ID NO: |
| | TCATTTTATGGTTGTATCAACA | 5630) |
| 692 | TGGGTGTGATAATTATCAATTAATGGGTGTAATTA | [X]GCDNYQLMGVIIILWLYQ[Q/H] (SEQ ID NO: |
| | TCATTTTATGGTTGTATCAACA | 5627) |
| 779 | TGGGTGTGATAATTATCAATTGATGGGTGTAATTA | [X]GCDNYQLMGVIIILWLYQ[Q/H] (SEQ ID NO: |
| | TCATTTTATGGTTGTATCAACA | 5627) |
| 780 | TGGGTGTGATAATTATCAATTTTTGGGTGTAATTAT | [X]GCDNYQFLGVIIILWLYQ[Q/H] (SEQ ID NO: |
| | CATTTTATGGTTGTATCAACA | 5631) |
| 693 | TGGGTGTGATAATTATCAATTTCTGGGTGTAATTA | [X]GCDNYQFLGVIIILWLYQ[Q/H] (SEQ ID NO: |
| | TCATTTTATGGTTGTATCAACA | 5631) |
| 782 | TGGGTGTGATAATTATCAATTTGTGGGTGTAATTA | [X]GCDNYQFVGVIIILWLYQ[Q/H] (SEQ ID NO: |
| | TCATTTTATGGTTGTATCAACA | 5632) |
| 783 | TGGGTGTGATAATTATCAATTTACGGGTGTAATTA | [X]GCDNYQFTGVIIILWLYQ[Q/H] (SEQ ID NO: |
| | TCATTTTATGGTTGTATCAACA | 5633) |
| 784 | TGGGTGTGATAATTATCAATTTATTGGTGTAATTAT | [X]GCDNYQFIGVIIILWLYQ[Q/H] (SEQ ID NO: |
| | CATTTTATGGTTGTATCAACA | 5634) |
| 785 | TGGGTGTGATAATTATCAATTTATCGGTGTAATTA | [X]GCDNYQFIGVIIILWLYQ[Q/H] (SEQ ID NO: |
| | TCATTTTATGGTTGTATCAACA | 5634) |
| 786 | TGGGTGTGATAATTATCAATTTATAGGTGTAATTA | [X]GCDNYQFIGVIIILWLYQ[Q/H] (SEQ ID NO: |
| | TCATTTTATGGTTGTATCAACA | 5634) |
| 787 | TGGGTGTGATAATTATCAATTTATGGGTGTAATTA | [X]GCDNYQFMGVIIILGLYQ[Q/H] (SEQ ID NO: |
| | TCATTTTAGGGTTGTATCAACA | 5635) |
| 717 | TGGGTGTGATAATTATCAATTTATGGGTGTAATTA | [X]GCDNYQFMGVIIILLLYQ[Q/H] (SEQ ID NO: |
| | TCATTTTATTGTTGTATCAACA | 5636) |
| 789 | TGGGTGTGATAATTATCAATTTATGGGTGTAATTA | [X]GCDNYQFMGVIIILSLYQ[Q/H] (SEQ ID NO: |
| | TCATTTTATCGTTGTATCAACA | 5637) |
| 790 | TGGGTGTGATAATTATCAATTTATGGGTGTAATTA | [X]GCDNYQFMGVIIILWLNQ[Q/H] (SEQ ID NO: |
| | TCATTTTATGGTTGAATCAACA | 5638) |
| 791 | TGGGTGTGATAATTATCAATTTATGGGTGTAATTA | [X]GCDNYQFMGVIIILWLSQ[Q/H] (SEQ ID NO: |
| | TCATTTTATGGTTGTCTCAACA | 5639) |
| 792 | TGGGTGTGATAATTATCAATTTATGGGTGTAATTA | [X]GCDNYQFMGVIIILWLYL[Q/H] (SEQ ID NO: |
| | TCATTTTATGGTTGTATCTACA | 5640) |
| 793 | TGGGTGTGATAATTATCAATTTATGGGTGTAATTA | [X]GCDNYQFMGVIIILWLYP[Q/H] (SEQ ID NO: |
| | TCATTTTATGGTTGTATCCACA | 5641) |
| 760 | TGGGAGTGATAATTATCAATTTATGGGTGTAATTA | [X]GSDNYQFMGVIIILWLYQ[Q/H] (SEQ ID NO: |
| | TCATTTTATGGTTGTATCAACA | 5614) |
| 795 | TGGGAGTGGTAATTATCAATTTATGGGTGTAATTA | [X]GSGNYQFMGVIIILWLYQ[Q/H] (SEQ ID NO: |
| | TCATTTTATGGTTGTATCAACA | 5642) |
| 796 | TGGGAGTGGTAATTATCAAATTATGGGTGTAATTA | [X]GSGNYQIMGVIIILWLYQ[Q/H] (SEQ ID NO: |
| | TCATTTTATGGTTGTATCAACA | 5643) |

Frame 6

| | | |
|---|---|---|
| 682 | TGGGTGTGATAATTATCAATTTATGGGTGTAATTA | [M/L/V]GVIIINLWV (SEQ ID NO: |
| | TCATTTTATGGTTGTATCAACA | 5591)*LSFYGCIN[X](SEQ ID NO: 5592) |
| 798 | TGGGTGTGATAATTATCATTTTATGGGTGTAATTAT | [M/L/V]GVIIIILWV(SEQ ID NO: |
| | CATTTTATGGTTGTATCAACA | 5593)*LSFYGCIN[X](SEQ ID NO: 5592) |
| 799 | TGGGTGTGATAATTATCACTTTATGGGTGTAATTA | [M/L/V]GVIIITLWV(SEQ ID NO: |
| | TCATTTTATGGTTGTATCAACA | 5594)*LSFYGCIN[X](SEQ ID NO: 5592) |
| 800 | TGGGTGTGATAATTATCAGTTTATGGGTGTAATTA | [M/L/V]GVIIISLWV(SEQ ID NO: |
| | TCATTTTATGGTTGTATCAACA | 5595)*LSFYGCIN[X](SEQ ID NO: 5592) |
| 801 | TGGGTGTGATAATTATCAATTTAGGGGTGTAATTA | [M/L/V]GVIIINLGV(SEQ ID NO: |
| | TCATTTTATGGTTGTATCAACA | 5596)*LSFYGCIN[X](SEQ ID NO: 5592) |
| 784 | TGGGTGTGATAATTATCAATTTATTGGTGTAATTAT | [M/L/V]GVIIINLLV(SEQ ID NO: |
| | CATTTTATGGTTGTATCAACA | 5597)*LSFYGCIN[X](SEQ ID NO: 5592) |
| 785 | TGGGTGTGATAATTATCAATTTATCGGTGTAATTA | [M/L/V]GVIIINLSV(SEQ ID NO: |
| | TCATTTTATGGTTGTATCAACA | 5598)*LSFYGCIN[X](SEQ ID NO: 5592) |
| 804 | TGGGTGTGATAATTATCAATTTATGGGTGCAATTA | [M/L/V]GVIIINLWVQLSFYGCIN[X] (SEQ ID NO: |
| | TCATTTTATGGTTGTATCAACA | 5599) |
| 805 | TGGGTGTGATAATTATCAATTTATGGGTGTTATTAT | [M/L/V]GVIIINLWVLLSFYGCIN[X] (SEQ ID NO: |
| | CATTTTATGGTTGTATCAACA | 5600) |
| 806 | TGGGTGTGATAATTATCAATTTATGGGTGTCATTA | [M/L/V]GVIIINLWVSLSFYGCIN[X] (SEQ ID NO: |
| | TCATTTTATGGTTGTATCAACA | 5601) |
| 807 | TGGGTGTGATAATTATCAATTTATGGGTGTAATTA | [M/L/V]GVIIINLWV(SEQ ID NO: |
| | TCACTTTATGGTTGTATCAACA | 5591)*LSLYGCIN[X](SEQ ID NO: 5602) |
| 705 | TGGGTGTGATAATTATCAATTTATGGGTGTAATTA | [M/L/V]GVIIINLWV (SEQ ID NO: |
| | TCAATTTATGGTTGTATCAACA | 5591)*LSIYGCIN[X](SEQ ID NO: 5603) |
| 706 | TGGGTGTGATAATTATCAATTTATGGGTGTAATTA | [M/L/V]GVIIINLWV (SEQ ID NO: |
| | TCAGTTTATGGTTGTATCAACA | 5591)*LSVYGCIN[X](SEQ ID NO: 5604) |
| 707 | TGGGTGTGATAATTATCAATTTATGGGTGTAATTA | [M/L/V]GVIIINLWV (SEQ ID NO: |
| | TCATCTTATGGTTGTATCAACA | 5591)*LSSYGCIN[X](SEQ ID NO: 5605) |
| 811 | TGGGTGTGATAATTATCAATTTATGGGTGTAATTA | [M/L/V]GVIIINLWV(SEQ ID NO: |
| | TCATTATATGGTTGTATCAACA | 5591)*LSLYGCIN[X](SEQ ID NO: 5602) |
| 812 | TGGGTGTGATAATTATCAATTTATGGGTGTAATTA | [M/L/V]GVIIINLWV(SEQ ID NO: |
| | TCATTGTATGGTTGTATCAACA | 5591)*LSLYGCIN[X](SEQ ID NO: 5602) |
| 711 | TGGGTGTGATAATTATCAATTTATGGGTGTAATTA | [M/L/V]GVIIINLWV(SBQ ID NO: |
| | TCATTTAATGGTTGTATCAACA | 5591)*LSFNGCIN[X](SEQ ID NO: 5606) |
| 714 | TGGGTGTGATAATTATCAATTTATGGGTGTAATTA | [M/L/V]GVIIINLWV(SEQ ID NO: |
| | TCATTTTCTGGTTGTATCAACA | 5591)*LSFSGCIN[X](SEQ ID NO: 5607) |
| 815 | TGGGTGTGATAATTATCAATTTATGGGTGTAATTA | [M/L/V]GVIIINLWV(SEQ ID NO: |
| | TCATTTTATGGTAGTATCAACA | 5591)*LSFYGSIN[X] (SEQ ID NO: 5612) |
| 816 | TGGGTGTGATAATTATCAATTTATGGGTGTAATTA | [M/L/V]GVIIINLWV(SEQ ID NO: |
| | TCATTTTATGGTGGTATCAACA | 5591)*LSFYGGIN[X](SEQ ID NO: 5608) |
| 817 | TGGGTGTGATAATTATCAATTTATGGGTGTAATTA | [M/L/V]GVIIINLWV(SEQ ID NO: |
| | TCATTTTATGGTTCTATCAACA | 5591)*LSFYGSIN[X] (SEQ ID NO: 5612) |
| 818 | TGGGTGTGATAATTATCAATTTATGGGTGTAATTA | [M/L/V]GVIIINLWV (SEQ ID NO: |
| | TCATTTTATGGTTGTATCATCA | 5591)*LSFYGCII[X ](SEQ ID NO: 5609) |
| 819 | TGGGTGTGATAATTATCAATTTATGGGTGTAATTA | [M/L/V]GVIIINLWV (SEQ ID NO: |
| | TCATTTTATGGTTGTATCACCA | 5591)*LSFYGCIT[X](SEQ ID NO: 5610) |
| 820 | TGGGTGTGATAATTATCAATTTATGGGTGTAATTA | [M/L/V]GVIIINLWV(SEQ ID NO: |
| | TCATTTTATGGTTGTATCAGCA | 5591)*LSFYGCIS[X](SEQ ID NO: 5610) |
| 798 | TGGGTGTGATAATTATCATTTTATGGGTGTAATTAT | [M/L/V]GVIIIILWV(SEQ ID NO: |
| | CATTTTATGGTTGTATCAACA | 5593)*LSFYGCIN[X](SEQ ID NO: 5592) |
| 822 | TGGGTGTGATAATTATCATTTTATGGGTGTTATTAT | [M/L/V]GVIIIILWVLLSFYGCIN[X] (SEQ ID NO: |
| | CATTTTATGGTTGTATCAACA | 5575) |
| 823 | TGGGTGTGATAATTATCATTTTATGGGTGTTATTAT | [M/L/V]GVIIIILWVLLSLYGCIN[X] (SEQ ID NO: |
| | CATTATATGGTTGTATCAACA | 5576) |
| 824 | TGGGTGTGATAATTATCATTTTATGGGTGTTATTAT | [M/L/V]GVIIIILWVLLSLNGCIN[X] (SEQ ID NO: |
| | CATTAAATGGTTGTATCAACA | 5577) |
| 825 | TGGGTGTGATAATTATCATTTTATGGGTGTTATTAT | [M/L/V]GVIIIILWVLLSLYGSIN[X] (SEQ ID NO: |
| | CATTATATGGTAGTATCAACA | 5578) |
| 826 | TGGGTGTGATAATTATCATTTTATGGGTGTTATTAT | [M/L/V]GVIIIILWVLLSLYGSIN[X] (SEQ ID NO: |
| | CATTATATGGTTCTATCAACA | 5578) |
| 827 | TGGGTGTGATAATTATCATTTTATGGGTGTTATTAT | [M/L/V]GVIIIILWVLLSLYGCII[X] (SEQ ID NO: |
| | CATTATATGGTTGTATCATCA | 5579) |
| 828 | TGGGTGTGATAATTATCATTTTATGGGTGTTATTAT | [M/L/V]GVIIIILWVLLSLYGCIT[X] (SEQ ID NO: |
| | CATTATATGGTTGTATCACCA | 5580) |
| 829 | TGGGTGTGATAATTATCATTTTATGGGTGTTATTAT | [M/L/V]GVIIIILWVLLSLYGCIS[X] (SEQ ID NO: |
| | CATTATATGGTTGTATCAGCA | 5581) |
| 830 | TGGGTGTGATAATTATCATTTTAGGGGTGTTATTAT | [M/L/V]GVIIIILGVLLSLYGCIN[X] (SEQ ID NO: |
| | CATTATATGGTTGTATCAACA | 5582) |
| 831 | TGGGTGTGATAATTATCATTTTATTGGTGTTATTAT | [M/L/V]GVIIIILLVLLSLYGCIN[X] (SEQ ID NO: |
| | CATTATATGGTTGTATCAACA | 5583) |
| 832 | TGGGTGTGATAATTATCATTTTATCGGTGTTATTAT | [M/L/V]GVIIIILSVLLSLYGCIN[X] (SEQ ID NO: |
| | CATTATATGGTTGTATCAACA | 5584) |
| 833 | TGGGTGTGATAATTATCATTTTATGGGTGTTATTAT | [M/L/V]GVIIIILWVLLSLNGSIN[X] (SEQ ID NO: |
| | CATTAAATGGTAGTATCAACA | 5585) |
| 834 | TGGGTGTGATAATTATCATTTTATGGGTGTTATTAT | [M/L/V]GVIIIILWVLLSLNGSIN[X] (SEQ ID NO: |
| | CATTAAATGGTTCTATCAACA | 5585) |
| 835 | TGGGTGTGATAATTATCATTTTATGGGTGTTATTAT | [M/L/V]GVIIIILWVLLSLNGSII[X] (SEQ ID NO: |
| | CATTAAATGGTAGTATCATCA | 5586) |
| 836 | TGGGTGTGATAATTATCATTTTATGGGTGTTATTAT | [M/L/V]GVIIIILWVLLSLNGSII[X] (SEQ ID NO: |
| | CATTAAATGGTTCTATCATCA | 5586) |
| 837 | TGGGTGTGATAATTATCATTTTATGGGTGTTATTAT | [M/L/V]GVIIIILWVLLSLNGSIS[X] (SEQ ID NO: |
| | CATTAAATGGTAGTATCAGCA | 5587) |
| 838 | TGGGTGTGATAATTATCATTTTATGGGTGTTATTAT | [M/L/V]GVIIIILWVLLSLNGSIS[X] (SEQ ID NO: |
| | CATTAAATGGTTCTATCAGCA | 5587) |
| 839 | TGGGTGTGATAATTATCATTTTATGGGTGTTATTAT | [M/L/V]GVIIIILWVLLSLYGSIS[X] (SEQ ID NO: |
| | CATTATATGGTAGTATCAGCA | 5588) |
| 840 | TGGGTGTGATAATTATCATTTTATGGGTGTTATTAT | [M/L/V]GVIIIILWVLLSLYGSIS[X] (SEQ ID NO: |
| | CATTATATGGTTCTATCAGCA | 5588) |
| 841 | TGGGTGTGATAATTATCATTTTAGGGGTGTTATTAT | [M/L/V]GVIIIILGVLLSLYGSIS[X] (SEQ ID NO: |
| | CATTATATGGTAGTATCAGCA | 5589) |
| 842 | TGGGTGTGATAATTATCATTTTATTGGTGTTATTAT | [M/L/V]GVIIIILLVLLSLYGSIS[X] (SEQ ID NO: |
| | CATTATATGGTTCTATCAGCA | 5590) |
| 843 | TGGGTGTGATAATTATCATTTTAGGGGTGTTATTAT | [M/L/V]GVIIIILGVLLSLNGSIS[X] (SEQ ID NO: |
| | CATTAAATGGTAGTATCAGCA | 5574) |
| 844 | TGGGTGTGATAATTATCATTTTATTGGTGTTATTAT | [M/L/V]GVIIIILLVLLSLNGSIS[X] (SEQ ID NO: |
| | CATTAAATGGTTCTATCAGCA | 5573) |

TABLE 2
Selected engineered (right) transposon end variant sequences

| | | | 57-bp | |
|---|---|---|---|---|
| | | | transposon | |
| ID | Alias | Description | right end | Amino acid sequence |
| WT | WT_minimal_ | 57-bp | TGTTGATACAACC | C*YNHKMIITPIN**LSHP |
| | pDonor, | WT | ATAAAATGATAAT | (in frame 1) |
| | Linker v1 | TnR | TACACCCATAAAT | (SEQ ID NOs: |
| | | | TGATAATTATCAC | 5352-5353) |
| | | | ACCCA | |
| | | | (SEQ ID NO: 1) | |
| ORF1a | Linker v2 | TnR | TGTgGATACAACC | CGYNHKMITPINGSLSPP |
| | | variant | ATAAAATGATAAT | (SEQ ID NOs: 5354) |
| | | ORF1a | TACACCCATAAAT | |
| | | | gGATcATTATCAC | |
| | | | cCCCA | |
| | | | (SEQ ID NO: 2) | |
| ORF1b | Linker v3 | TnR | TGTgGATACAACC | CGYNHKTIITPINGSLSHP |
| | | variant | ATAAAAcGATAAT | (SEQ ID NOs: 5355) |
| | | ORF1b | TACACCCATAAAT | |
| | | | gGATcATTATCAC | |
| | | | ACCCA (SEQ ID | |
| | | | NO: 3) | |
| ORF1c | Linker v4 | TnR | TGTgGATcCAACC | CGSNHKMITPINGSLSHP |
| | | variant | ATAAAATGATAAT | (SEQ ID NOs: 5356) |
| | | ORF1c | TACACCCATAAAT | |
| | | | gGATcATTATCAC | |
| | | | ACCCA (SEQ ID | |
| | | | NO: 4) | |
| ORF2a | Linker v5 | TR | TGTTGATACAACC | [X]VDTTIKGLLHPLIDNYHT |
| | | variant | ATAAAAgGATtAT | [Q/H](SEQ ID NO: 5357) |
| | | ORF2a | TACACCCATIAAT | |
| | | | TGATAATTATCAC | |
| | | | ACCCA (SEQ ID | |
| | | | NO: 5) | |
| ORF3a | Linker v6 | TnR | TGTTGATACAACC | [M/L/V]LIQPSNGNYTHKLIIITP |
| | | variant | ATcAAATGgTAAT | [X](SEQ ID NO: 5358) |
| | | ORF3a | TACACCCATAAAT | |
| | | | TGATAATTATCAC | |
| | | | ACCCA (SEQ ID | |
| | | | NO: 6) | |
| ORF3b | Linker v7 | TnR | TGTTGATACAACC | [M/L/V]LIQPLNDNSTHNLIITP |
| | | variant | ATAAATGATAATT | [X](SEQ ID NO: 5359) |
| | | ORF3b | CCACCCATAAtTT | |
| | | | GATAATTATCACA | |
| | | | CCCA (SEQ ID | |
| | | | NO: 7) | |
| ORF3c | Linker v8 | TnR | TGTTGATACAACC | [M/L/V]LIQPLNGNSTQILIITP |
| | | variant | ATAAATGgTAATT | [X](SEQ ID NO: 5360) |
| | | ORF3c | CCACCCAaAtATT | |
| | | | GATAATTATCACA | |
| | | | CCCA | |
| | | | (SEQ ID NO: 8) | |

TABLE 3
IHF protein constructs

| | | SEQ ID |
|---|---|---|
| Protein name | Protein sequence | NO |
| hCO dcIHFA-NLS | MALTKAEMSEYLFDKLGLSKRDAKELVELFFEEIRRALEN | 5136 |
| | GEQVKLSGFGNFDLRDKNQRPGRNPKTGEDIPITARRVVT | |
| | FRPGQKLKSRVENASPKDEGSGKRTADGSEFESPKKKRKV | |
| | * | |
| hCO NLS-dcIHFA | MGKRTADGSEFESPKKKRKVGSGMALTKAEMSEYLFDKLG | 5137 |
| | LSKRDAKELVELFFEEIRRALENGEQVKLSGFGNFDLRDK | |
| | NQRPGRNPKTGEDIPITARRVVTFRPGQKLKSRVENASPK | |
| | DE* | |
| hCO dcIHFB-NLS | MGTKSELIERLATQQSHIPAKTVEDAVKEMLEHMASTLAQ | 5138 |
| | GERIEIRGFGSFSLHYRAPRTGRNPKTGDKVELEGKYVPH | |
| | FKPGKELRDRANIYGGSGKRTADGSEFESPKKKRKV* | |
| hCO NLS-dcIHFB | MGKRTADGSEFESPKKKRKVGSGMGTKSELIERLATQQSH | 5139 |
| | IPAKTVEDAVKEMLEHMASTLAQGERIEIRGFGSFSLHYR | |
| | APRTGRNPKTGDKVELEGKYVPHFKPGKELRDRANIYG* | |
| hCO NLS-scIHF2 | MGTKSELIERLATQQSHIPAKTVEDAVKEMLEHMASTLAQ | 5140 |
| | GGSGGLTKAEMSEYLFDKLGLSKRDAKELVELFFEEIRRA | |
| | LENGEQVKLSGFGNFDLRDKNQRPGRNPKTGEDIPITARR | |
| | VVTFRPGQKLKSRVENAGGGERIEIRGFGSFSLHYRAPRT | |
| | GRNPKTGDKVELEGKYVPHFKPGKELRDRANIYG* | |
| hCO scIHF2 | MGTKSELIERLATQQSHIPAKTVEDAVKEMLEHMASTLAQ | 5141 |
| | GGSGGLTKAEMSEYLFDKLGLSKRDAKELVELFFEEIRRA | |
| | LENGEQVKLSGFGNFDLRDKNQRPGRNPKTGEDIPITARR | |
| | VVTFRPGQKLKSRVENAGGGERIEIRGFGSFSLHYRAPRT | |
| | GRNPKTGDKVELEGKYVPHFKPGKELRDRANIYG* | |
| TnsA-NLS- | MYIRNLRKPSPNKNVFKFASTKVSSVVMCESSLEFDACFH | 5142 |
| GSGSGG-IHF- | HEYNDLIESFGSQPEGFKYEFMGKSLPYTPDALISYTDKT | |
| XTEN-GS-TasB | QKYHEYKPYSKIASPLFRABFAAKRAASLKLGIDLVLVTD | |
| | RQIRVNPILNNLKLLHRYSGVYGISGIQKELLSFIHKSGV | |
| | IKLNDISSQVGIPIGETRSFLFGLMHKGLVKADLGCDDLT | |
| | NNPTLWATPGSGSGKRTADGSEFESPKKKRKVGSGSGGMG | |
| | TKSELIERLATQQSHIPAKTVEDAVKEMLEHMASTLAQGG | |
| | SGGLTKAEMSEYLFDKLGLSKRDAKELVELFFEEIRRALE | |
| | NGEQVKLSGFGNFDLRDKNQRPGRNPKTGEDIPITARRVV | |
| | TFRPGQKLKSRVENAGGGERIEIRGFGSFSLHYRAPRTGR | |
| | NPKTGDKVELEGKYVPHFKPGKELRDRANIYGSGSETPGT | |
| | SESATPESGGSGSSGGSGSSGGMTDFFNEFDESLVPLKPQ | |
| | TPTQYVKLDDANLIQRDLDTFSDTFKNQALQRYKLISTID | |
| | KKLSRGWTQRNLDPILDELFKGGDVVRPNWRTVARWRKKY | |
| | IESNGDIASLADKNHKMGNRTNRIKGDDKFEDKALERFLD | |
| | AKRPTIATAYQYYKDLIVIENESIVEGKIPIISYNAFNKR | |
| | IKAIPPYAVAVARHGKFKADQWFAYCAAHVPPTRILERVE | |
| | IDHTPLDLILLDDELLIPIGRPYLTLLIDVFSGCVLGFHL | |
| | SYKSPSYVSAAKAITHAIKPKSLDALNIELQNDWPCFGKF | |
| | ENLVVDNGAEFWSKNLEHACQSAGINIQYNPVRKPWLKPF | |
| | IERFFGVMNEYFLPELPGKTFSNILEKEEYKPEKDAIMRF | |
| | STFVEEFHRWIADVYHQDSNSRETRIPIKRWQQGFDAYPP | |
| | LTMNEEEETRESMLMRISDSRTLTRNGFKYQELMYDSTAL | |
| | ADYRKHYPQTKETVKKLIKVDPDDISKIYVYLEELESYLE | |
| | VPCTDPTGYTDGLSIYEHKTIKKINREVIRESKDSLGLAK | |
| | ARMAIHERVKQEQEVFIESKTKAKITAVKKQAQIADVSNT | |
| | GTSTIKVSEESAAPVQKHISNDNSDDWDDDLEAFE* | |
| TnsA-NLS- | MYIRNLRKPSPNKNVFKFASTKVSSVVMCESSLEFDACFH | 5143 |
| GSGSGG-XTEN- | HEYNDLIESFGSQPEGFKYEFMGKSLPYTPDALISYTDKT | |
| IHF-XTEN-GS- | QKYHEYKPYSKIASPLFRAEFAAKRAASLKLGIDLVLVTD | |
| TnsB | RQIRVNPILNNLKLLHRYSGVYGISGIQKELLSFIHKSGV | |
| | IKLNDISSQVGIPIGETRSFLFGLMHKGLVKADLGCDDLT | |
| | NNPTLWATPGSGSGKRTADGSEFESPKKKRKVGSSGSETP | |
| | GTSESATPESSGGSSGGSSTMGTKSELIERLATQQSHIPA | |
| | KTVEDAVKEMLEHMASTLAQGGSGGLTKAEMSEYLEDKLG | |
| | LSKRDAKELVELFFEEIRRALENGEQVKLSGFGNFDLRDK | |
| | NQRPGRNPKTGEDIPITARRVVTFRPGQKLKSRVENAGGG | |
| | ERIEIRGFGSFSLHYRAPRTGRNPKTGDKVELEGKYVPHF | |
| | KPGKELRDRANIYGSGSETPGTSESATPESGGSGSSGGSG | |
| | SSGGMTDFFNEFDESLVPLKPQTPTQYVKLDDANLIQRDL | |
| | DTFSDTFKNQALQRYKLISTIDKKLSRGWTQRNLDPILDE | |
| | LFKGGDVVRPNWRTVARWRKKYIESNGDIASLADKNHKMG | |
| | NRTNRIKGDDKFFDKALERFLDAKRPTIATAYQYYKDLIV | |
| | IENESIVEGKIPIISYNAFNKRIKAIPPYAVAVARHGKFK | |
| | ADQWFAYCAAHVPPTRILERVEIDHTPLDLILLDDELLIP | |
| | IGRPYLTLLIDVFSGCVLGFHLSYKSPSYVSAAKAITHAI | |
| | KPKSLDALNIELQNDWPCFGKFENLVVDNGAEFWSKNLEH | |
| | ACQSAGINIQYNPVRKPWLKPFIERFFGVMNEYFLPELPG | |
| | KTESNILEKEEYKPEKDAIMRESTFVEEFHRWIADVYHQD | |
| | SNSRETRIPIKRWQQGFDAYPPLTMNEEEETRFSMLMRIS | |
| | DSRTLTRNGFKYQELMYDSTALADYRKHYPQTKETVKKLI | |
| | KVDPDDISKIYVYLEELESYLEVPCTDPTGYTDGLSIYEH | |
| | KTIKKINREVIRESKDSLGLAKARMAIHERVKQEQEVFIE | |
| | SKTKAKITAVKKQAQIADVSNTGTSTIKVSEESAAPVQKH | |
| | ISNDNSDDWDDDLEAFE* | |
| TnsA-NLS-(GGS)6- | MYIRNLRKPSPNKNVFKFASTKVSSVVMCESSLEFDACFH | 5144 |
| IHF-(XTEN)3-TnsB | HEYNDLIESFGSQPEGFKYEFMGKSLPYTPDALISYTDKT | |
| | QKYHEYKPYSKIASPLFRAEFAAKRAASLKLGIDLVLVTD | |
| | RQIRVNPILNNLKLLHRYSGVYGISGIQKELLSFIHKSGV | |
| | IKLNDISSQVGIPIGETRSFLFGLMHKGLVKADLGCDDLT | |
| | NNPTLWATPGSGSGKRTADGSEFESPKKKRKVGSGGSGGS | |
| | GGSGGSGGSGGSMGTKSELIERLATQQSHIPAKTVEDAVK | |
| | EMLEHMASTLAQGGSGGLTKAEMSEYLFDKLGLSKRDAKE | |
| | LVELFFEBIRRALENGEQVKLSGFGNFDLRDKNQRPGRNP | |
| | KTGEDIPITARRVVTFRPGQKLKSRVENAGGGERIBIRGF | |
| | GSFSLHYRAPRTGRNPKTGDKVELEGKYVPHFKPGKELRD | |
| | RANIYGSGGSSGGSSGSETPGTSESATPESSGSETPGTSE | |
| | SATPESSGSETPGTSESATPESSGGSSGGSSTMTDFFNEF | |
| | DESLVPLKPQTPTQYVKLDDANLIQRDLDTFSDTFKNQAL | |
| | QRYKLISTIDKKLSRGWTQRNLDPILDELFKGGDVVRPNW | |
| | RTVARWRKKYIESNGDIASLADKNHKMGNRTNRIKGDDKF | |
| | FDKALERFLDAKRPTIATAYQYYKDLIVIENESIVEGKIP | |
| | IISYNAFNKRIKAIPPYAVAVARHGKFKADQWFAYCAAHV | |
| | PPTRILERVEIDHTPLDLILLDDELLIPIGRPYLTLLIDV | |
| | FSGCVLGFHLSYKSPSYVSAAKAITHAIKPKSLDALNIEL | |
| | QNDWPCFGKFENLVVDNGAEFWSKNLEHACQSAGINIQYN | |
| | PVRKPWLKPFIERFFGVMNEYFLPELPGKTFSNILEKEEY | |
| | KPEKDAIMRESTFVEEFHRWIADVYHQDSNSRETRIPIKR | |
| | WQQGFDAYPPLTMNEEEETRESMLMRISDSRTLTRNGFKY | |
| | QELMYDSTALADYRKHYPQTKETVKKLIKVDPDDISKIYV | |
| | YLEELESYLEVPCTDPTGYTDGLSIYEHKTIKKINREVIR | |
| | ESKDSLGLAKARMAIHERVKQEQEVFIESKTKAKITAVKK | |
| | QAQIADVSNTGTSTIKVSEESAAPVQKHISNDNSDDWDDD | |
| | LEAFE* | |
| TnsA-NLS- | MYIRNLRKPSPNKNVFKFASTKVSSVVMCESSLEFDACFH | 5145 |
| (XTEN)3-IHF- | HEYNDLIESFGSQPEGFKYEFMGKSLPYTPDALISYTDKT | |
| (GGS)6-TnsB | QKYHEYKPYSKIASPLFRAEFAAKRAASLKLGIDLVLVTD | |
| | RQIRVNPILNNLKLLHRYSGVYGISGIQKELLSFIHKSGV | |
| | IKLNDISSQVGIPIGETRSFLFGLMHKGLVKADLGCDDLT | |
| | NNPTLWATPGSGSGKRTADGSEFESPKKKRKVGSSGGSSG | |
| | GSSGSETPGTSESATPESSGSETPGTSESATPESSGSETP | |
| | GTSESATPESSGGSSGGSSTMGTKSELIERLATQQSHIPA | |
| | KTVEDAVKEMLEHMASTLAQGGSGGLTKAEMSEYLFDKLG | |
| | LSKRDAKELVELFFEEIRRALENGEQVKLSGFGNFDLRDK | |
| | NQRPGRNPKTGEDIPITARRVVTFRPGQKLKSRVENAGGG | |
| | ERIEIRGFGSFSLHYRAPRTGRNPKTGDKVELEGKYVPHF | |
| | KPGKELRDRANIYGGGSGGSGGSGGSGGSGGSMTDFFNEF | |
| | DESLVPLKPQTPTQYVKLDDANLIQRDLDTFSDTFKNQAL | |
| | QRYKLISTIDKKLSRGWTQRNLDPILDELFKGGDVVRPNW | |
| | RTVARWRKKYIESNGDIASLADKNHKMGNRTNRIKGDDKF | |
| | FDKALERFLDAKRPTIATAYQYYKDLIVIENESIVEGKIP | |
| | IISYNAFNKRIKAIPPYAVAVARHGKFKADQWFAYCAAHV | |
| | PPTRILERVEIDHTPLDLILLDDELLIPIGRPYLTLLIDV | |
| | FSGCVLGFHLSYKSPSYVSAAKAITHAIKPKSLDALNIEL | |
| | QNDWPCFGKFENLVVDNGAEFWSKNLEHACQSAGINIQYN | |
| | PVRKPWLKPFIERFFGVMNEYFLPELPGKTFSNILEKEEY | |
| | KPEKDAIMRFSTFVEEFHRWIADVYHQDSNSRETRIPIKR | |
| | WQQGFDAYPPLTMNEEEETRESMLMRISDSRTLTRNGFKY | |
| | QELMYDSTALADYRKHYPQTKETVKKLIKVDPDDISKIYV | |
| | YLEELESYLEVPCTDPTGYTDGLSIYEHKTIKKINREVIR | |
| | ESKDSLGLAKARMAIHERVKQEQEVFIESKTKAKITAVKK | |
| | QAQIADVSNTGTSTIKVSEESAAPVQKHISNDNSDDWDDD | |
| | LEAFE* | |
| IHF-dCas9 | MPKKKRKVGGSGGSMGTKSELIERLATQQSHIPAKTVEDA | 5146 |
| | VKEMLEHMASTLAQGGSGGLTKAEMSEYLFDKLGLSKRDA | |
| | KELVELFFEEIRRALENGEQVKLSGFGNFDLRDKNQRPGR | |
| | NPKTGEDIPITARRVVTFRPGQKLKSRVENAGGGERIEIR | |
| | GFGSFSLHYRAPRTGRNPKTGDKVELEGKYVPHFKPGKEL | |
| | RDRANIYGGGGSGGGSGTGGSGGSGGSGGSGGSGRPMDKK | |
| | YSIGLAIGTNSVGWAVITDEYKVPSKKFKVLGNTDRHSIK | |
| | KNLIGALLEDSGETAEATRLKRTARRRYTRRKNRICYLQE | |
| | IFSNEMAKVDDSFFHRLEESFLVEEDKKHERHPIFGNIVD | |
| | EVAYHEKYPTIYHLRKKLVDSTDKADLRLIYLALAHMIKF | |
| | RGHFLIEGDLNPDNSDVDKLFIQLVQTYNQLFEENPINAS | |
| | GVDAKAILSARLSKSRRLENLIAQLPGEKKNGLFGNLIAL | |
| | SLGLTPNEKSNFDLAEDAKLQLSKDTYDDDLDNLLAQIGD | |
| | QYADLFLAAKNLSDAILLSDILRVNTEITKAPLSASMIKR | |
| | YDEHHQDLTLLKALVRQQLPEKYKEIFFDQSKNGYAGYID | |
| | GGASQEEFYKFIKPILEKMDGTEELLVKLNREDLLRKQRT | |
| | FDNGSIPHQIHLGELHAILRRQEDFYPFLKDNREKIEKIL | |
| | TFRIPYYVGPLARGNSRFAWMTRKSEETITPWNFEEVVDK | |
| | GASAQSFIERMTNFDKNLPNEKVLPKHSLLYEYFTVYNEL | |
| | TKVKYVTEGMRKPAFLSGEQKKAIVDLLFKTNRKVTVKQL | |
| | KEDYFKKIECFDSVEISGVEDRENASLGTYHDLLKIIKDK | |
| | DFLDNEENEDILEDIVLTLTLFEDREMIEERLKTYAHLFD | |
| | DKVMKQLKRRRYTGWGRLSRKLINGIRDKQSGKTILDFLK | |
| | SDGFANRNFMQLIHDDSLTFKEDIQKAQVSGQGDSLHEHI | |
| | ANLAGSPAIKKGILQTVKVVDELVKVMGRHKPENIVIEMA | |
| | RENQTTQKGQKNSRERMKRIEEGIKELGSQILKEHPVENT | |
| | QLQNEKLYLYYLQNGRDMYVDQELDINRLSDYDVDAIVPQ | |
| | SFLKDDSIDNKVLTRSDKNRGKSDNVPSEEVVKKMKNYWR | |
| | QLLNAKLITQRKFDNLTKAERGGLSELDKAGFIKRQLVET | |
| | RQITKHVAQILDSRMNTKYDENDKLIREVKVITLKSKLVS | |
| | DFRKDFQFYKVREINNYHHAHDAYLNAVVGTALIKKYPKL | |
| | ESEFVYGDYKVYDVRKMIAKSEQEIGKATAKYFFYSNIMN | |
| | FFKTEITLANGEIRKRPLIETNGETGEIVWDKGRDFATVR | |
| | KVLSMPQVNIVKKTEVQTGGFSKESILPKRNSDKLIARKK | |
| | DWDPKKYGGFDSPTVAYSVLVVAKVEKGKSKKLKSVKELL | |
| | GITIMERSSFEKNPIDFLEAKGYKEVKKDLIIKLPKYSLF | |
| | ELENGRKRMLASAGELQKGNELALPSKYVNFLYLASHYEK | |
| | LKGSPEDNEQKQLFVEQHKHYLDEIIEQISEFSKRVILAD | |
| | ANLDKVLSAYNKHRDKPIREQAENIIHLFTLTNLGAPAAF | |
| | KYEDTTIDRKRYTSTKEVLDATLIHQSITGLYETRIDLSQ | |
| | LGGDGGSGGSGGSGGSGGSASGGGSGGGSKRPAATKKAGQ | |
| | AKKKKGGSGSGATNFSLLKQAGDVEENPGPAAA* | |
| Integration host | MALTKAEMSEYLEDKLGLSKRDAKELVELFFEEIRRALEN | 5147 |
| factor subunit alpha | GEQVKLSGFGNFDLRDKNQRPGRNPKTGEDIPITARRVVT | |
| (E. coli) | FRPGQKLKSRVENASPKDE | |
| Integration host | MTKSELIERLATQQSHIPAKTVEDAVKEMLEHMASTLAQG | 5148 |
| factor subunit beta | ERIEIRGFGSFSLHYRAPRTGRNPKTGDKVELEGKYVPHF | |
| (E. coli) | KPGKELRDRANIYG | |
| Integration host | MALTKAELAEALFEQLGMSKRDAKDTVEVFFEEIRKALES | 5149 |
| factor subunit alpha | GEQVKLSGFGNFDLRDKNERPGRNPKTGEDIPITARRVVT | |
| (Vibrio cholerae | FRPGQKLKARVENIKVEK | |
| HE-45) | | |
| Integration host | MTKSELIERLCAEQTHLSAKEIEDAVKNILEHMASTLEAG | 5150 |
| factor subunit beta | ERIEIRGFGSFSLHYREPRVGRNPKTGDKVELEGKYVPHF | |
| (Vibrio cholerae | KPGKELRERVNL | |
| HE-45) | | |
| Integration host | MALTKADIAEHLFEKLGINKKDAKDLVEAFFEEIRSALEK | 5151 |
| factor subunit alpha | GEQVKLSGFGNFDLRDKKERPGRNPKTGEDIPISARRVVT | |
| (Psuedoalteromonas | FRPGQKLKTRVEVGTSKAK | |
| sp. S983) | | |
| Integration host | MTKSELIETLAEQHAHVPVKDVENAVKEILEQMAGSLSTS | 5152 |
| factor subunit beta | DRIEIRGFGSFSLHYRAPRTGRNPKTGDTVELDGKHVPHF | |
| (Psuedoalteromonas | KPGKELRDRVNESIA | |
| sp. S983) | | |

TABLE 4
Selected Variant Transposition

| | | | | | | | | | normalized | | |
|---|---|---|---|---|---|---|---|---|---|---|---|
| | | | | | | | | | log2 fold- | | |
| | | | | | | | | | change | | |
| | | | | | | | log2 fold-change | | log2 | | |
| | | | | abundance (Ab) = | | | log2(AbOutput/ | | (foldchange/ | | |
| | Read count | | | (count/total_counts) | | | AbInput) | | average WT foldchange) | | Read count |
| ID | input | LR | RL | input | LR | RL | LR | RL | LR | RL | input |
| ORF1a | 1420 | 585 | 715 | 0.0426 | 0.0597 | 0.0323 | 0.4861 | −0.3989 | 1.22 | −1.47 | 1420 |
| ORF1b | 2578 | 672 | 883 | 0.0773 | 0.0685 | 0.0399 | −0.1742 | −0.9548 | 0.56 | −2.03 | 2578 |
| ORF1c | 2368 | 729 | 791 | 0.0710 | 0.0744 | 0.0357 | 0.0658 | −0.9910 | 0.80 | −2.06 | 2368 |
| ORF2a | 2365 | 973 | 708 | 0.0710 | 0.0992 | 0.0320 | 0.4842 | −1.1491 | 1.22 | −2.22 | 2365 |
| ORF3a | 778 | 621 | 695 | 0.0233 | 0.0633 | 0.0314 | 1.4403 | 0.4282 | 2.18 | −0.64 | 778 |
| ORF3b | 1124 | 1170 | 877 | 0.0337 | 0.1193 | 0.0396 | 1.8233 | 0.2330 | 2.56 | −0.84 | 1124 |
| ORF3c | 2525 | 903 | 629 | 0.0758 | 0.0921 | 0.0284 | 0.2820 | −1.4142 | 1.02 | −2.49 | 2525 |

| | | | | | | | | normalized | |
|---|---|---|---|---|---|---|---|---|---|
| | | | | | | | | log2 fold- | |
| | | | | | | | | change | |
| | | | | | | log2 fold-change | | log2 | |
| | | | abundance (Ab) = | | | log2(AbOutput/ | | (foldchange/ | |
| | Read count | | (count/total_counts) | | | AbInput) | | average_WT_foldchange) | |
| ID | LR | RL | input | LR | RL | LR | RL | LR | RL |
| ORF1a | 677 | 955 | 0.0426 | 0.0378 | 0.0765 | 0.8443 | −0.1720 | 1.49 | −1.08 |
| ORF1b | 822 | 1209 | 0.0773 | 0.0479 | 0.0929 | 0.2639 | −0.6922 | 0.91 | −1.60 |
| ORF1c | 742 | 1183 | 0.0710 | 0.0468 | 0.0838 | 0.2388 | −0.6009 | 0.89 | −1.51 |
| ORF2a | 999 | 953 | 0.071 | 0.0377 | 0.1129 | 0.6696939 | −0.9110151 | 1.32 | −1.82 |
| ORF3a | 651 | 1066 | 0.0233 | 0.0422 | 0.0736 | 1.6558648 | 0.8546424 | 2.30 | −0.05 |
| ORF3b | 1058 | 1021 | 0.0337 | 0.0404 | 0.1195 | 1.825675 | 0.2616178 | 2.47 | −0.65 |
| ORF3c | 645 | 972 | 0.0758 | 0.0385 | 0.0729 | −0.0559349 | −0.9769782 | 0.59 | −1.89 |

TABLE 5
Tn6677 hyperactive transposon right end variants.

| | | | | | | | Enrichment score = |
|---|---|---|---|---|---|---|---|
| | | | | Ab = Abundance = | | | Log2 (FC = Fold Change = |
| Variant | Read count | | | (count/total_counts) | | | (Ab_Output/Ab_Input)) |
| SEQ ID NO: | Input | RL | LR | input | RL | LR | RL |
| 2691 | 144 | 534 | 62 | 0.00833458 | 0.04369821 | 0.01347144 | 2.39039236 |
| 2692 | 165 | 522 | 74 | 0.00955004 | 0.04271623 | 0.01607881 | 2.16120521 |
| 2693 | 502 | 1453 | 170 | 0.02905528 | 0.11890169 | 0.03693781 | 2.03289686 |
| 2694 | 497 | 1323 | 170 | 0.02876589 | 0.10826354 | 0.03693781 | 1.91211673 |
| 2695 | 343 | 880 | 147 | 0.01985251 | 0.07201203 | 0.03194034 | 1.85891638 |
| 2696 | 591 | 1530 | 183 | 0.03420652 | 0.12520274 | 0.03976247 | 1.87192305 |
| 2697 | 416 | 1192 | 165 | 0.02407768 | 0.09754357 | 0.03585141 | 2.01835023 |
| 2698 | 661 | 1483 | 194 | 0.03825805 | 0.12135664 | 0.04215256 | 1.66541785 |
| 2699 | 873 | 2177 | 301 | 0.05052841 | 0.17814795 | 0.06540166 | 1.81790928 |
| 2700 | 528 | 1279 | 190 | 0.03056014 | 0.10466294 | 0.04128344 | 1.77602786 |
| 2701 | 711 | 1706 | 186 | 0.041152 | 0.13960514 | 0.04041431 | 1.76231761 |
| 2702 | 680 | 1639 | 217 | 0.03935775 | 0.13412241 | 0.04715003 | 1.76883063 |

| | Enrichment score = | | | | |
|---|---|---|---|---|---|
| | Log2 (FC = Fold Change = | Normalized enrichment | | Normalized FC = | |
| Variant | (Ab_Output/Ab_Input)) | Log2 (Normalized FC) | | Normalized enrichment \hat{ } 2 | |
| SEQ ID NO: | LR | RL | LR | RL | LR |
| 2691 | 0.69272194 | 1.39407206 | 1.12302665 | 2.628194525 | 2.178034264 |
| 2692 | 0.75158178 | 1.16488491 | 1.18188649 | 2.242153283 | 2.268732461 |
| 2693 | 0.34629801 | 1.03657656 | 0.77660272 | 2.051354117 | 1.713092104 |
| 2694 | 0.36073952 | 0.91579643 | 0.79104424 | 1.886610275 | 1.730326441 |
| 2695 | 0.68605821 | 0.86259607 | 1.11636292 | 1.818307337 | 2.16799724 |
| 2696 | 0.21713614 | 0.87560274 | 0.64744086 | 1.834774472 | 1.566387177 |
| 2697 | 0.57433312 | 1.02202993 | 1.00463784 | 2.030774332 | 2.006439757 |
| 2698 | 0.13985701 | 0.66909755 | 0.57016172 | 1.590078014 | 1.484689989 |
| 2699 | 0.37223246 | 0.82158898 | 0.80253717 | 1.767351477 | 1.744165777 |
| 2700 | 0.43391212 | 0.77970756 | 0.86421683 | 1.716782839 | 1.820351217 |
| 2701 | −0.0260963 | 0.76599731 | 0.4042084 | 1.700545149 | 1.323362588 |
| 2702 | 0.26061092 | 0.77251033 | 0.69091564 | 1.708239584 | 1.614307751 |

TABLE 6
Tn6677 hyperactive transposon left end variants.

| | | | | | | | Enrichment score = |
|---|---|---|---|---|---|---|---|
| | | | | Ab = Abundance = | | | Log2 (FC = Fold Change = |
| Variant | Read count | | | (count/total_counts) | | | (Ab_Output/Ab_Input)) |
| SEQ ID NO: | Input | RL | LR | input | RL | LR | RL |
| 4666 | 366 | 1970 | 638 | 0.029638 | 0.12776461 | 0.12956682 | 2.10796813 |
| 4667 | 778 | 3348 | 727 | 0.063001 | 0.21713499 | 0.14764119 | 1.78514552 |
| 4668 | 613 | 2242 | 687 | 0.04963961 | 0.14540521 | 0.13951788 | 1.55051536 |
| 4669 | 565 | 1992 | 494 | 0.04575266 | 0.12919143 | 0.1003229 | 1.49758293 |
| 4670 | 596 | 2077 | 444 | 0.04826298 | 0.13470411 | 0.09016876 | 1.48080504 |
| 4671 | 774 | 2499 | 666 | 0.06267709 | 0.16207298 | 0.13525314 | 1.37063349 |
| 4672 | 875 | 2802 | 448 | 0.07085588 | 0.18172408 | 0.09098109 | 1.35879009 |
| 4673 | 655 | 2086 | 623 | 0.05304069 | 0.13528781 | 0.12652058 | 1.3508604 |

| | Enrichment score = | | | | |
|---|---|---|---|---|---|
| | Log2 (FC = Fold Change = | Normalized enrichment | | Normalized FC = | |
| Variant | (Ab_Output/Ab_Input)) | Log2 (Normalized FC) | | Normalized enrichment \hat{ } 2 | |
| SEQ ID NO: | LR | RL | LR | RL | LR |
| 4666 | 2.1281762 | 1.36927774 | 1.54104242 | 2.583411998 | 2.910046931 |
| 4667 | 1.22864863 | 1.04645514 | 0.64151485 | 2.065448574 | 1.559966286 |
| 4668 | 1.49088645 | 0.81182497 | 0.90375267 | 1.755430611 | 1.870926224 |
| 4669 | 1.1327236 | 0.75889254 | 0.54558982 | 1.692191145 | 1.45961696 |
| 4670 | 0.90171077 | 0.74211465 | 0.31457699 | 1.672625717 | 1.243646952 |
| 4671 | 1.10965203 | 0.6319431 | 0.52251825 | 1.549650742 | 1.436460428 |
| 4672 | 0.36067914 | 0.6200997 | −0.2264546 | 1.536981393 | 0.854732805 |
| 4673 | 1.25420068 | 0.61217001 | 0.6670669 | 1.528556638 | 1.587841491 |

TABLE 7
Transposon Left end Variants SEQ ID NOs: 3120-4665

| | Normalized | Normalized |
|---|---|---|
| | enrichment = Log2 | enrichment = Log2 |
| SEQ | (Normalized | (Normalized |
| ID | FC) − RL | FC) − RL |
| NO | (1^{st} Replicate) | (2^{nd} Replicate) |
| 3120 | −0.0920 | −0.1196 |
| 3121 | −0.1589 | −0.1221 |
| 3122 | −0.3028 | −0.1583 |
| 3123 | −0.1687 | −0.0930 |
| 3124 | 0.3025 | 0.7183 |
| 3125 | −0.0271 | 0.0739 |
| 3126 | −0.0323 | −0.1814 |
| 3127 | −0.0960 | 0.0584 |
| 3128 | 0.2132 | −0.0754 |
| 3129 | −0.0700 | −0.1073 |
| 3130 | −0.1346 | −0.1114 |
| 3131 | −0.1020 | −0.0508 |
| 3132 | −0.4968 | −0.3233 |
| 3133 | 0.0804 | 0.0462 |
| 3134 | 0.0547 | 0.1251 |
| 3135 | −0.0254 | −0.1459 |
| 3136 | −0.4439 | −0.0746 |
| 3137 | 0.3111 | 0.1639 |
| 3138 | 0.4355 | 0.3983 |
| 3139 | −0.3595 | −0.2221 |
| 3140 | −0.1083 | −0.0183 |
| 3141 | −0.5151 | −0.3808 |
| 3142 | −0.3106 | −0.2442 |
| 3143 | −0.1557 | 0.0135 |
| 3144 | 0.1481 | 0.3777 |
| 3145 | −0.4356 | −0.1720 |
| 3146 | −0.7206 | −0.5393 |
| 3147 | −0.3510 | −0.1659 |
| 3148 | −0.1876 | −0.0795 |
| 3149 | −0.3738 | −0.0162 |
| 3150 | −0.2141 | −0.0705 |
| 3151 | −0.0857 | 0.0537 |
| 3152 | −0.6942 | −0.3374 |
| 3153 | −0.4993 | −0.3103 |
| 3154 | −0.0674 | 0.4852 |
| 3155 | −0.7764 | −0.5471 |
| 3156 | −0.4871 | 0.1020 |
| 3157 | −0.5977 | 0.0836 |
| 3158 | −0.9712 | −0.3965 |
| 3159 | −0.4368 | 0.0634 |
| 3160 | −1.1051 | −0.4840 |
| 3161 | −0.7405 | −0.3679 |
| 3162 | −0.6708 | −0.1799 |
| 3163 | −1.1210 | −0.4550 |
| 3164 | −1.0947 | −0.4992 |
| 3165 | −2.2545 | −1.3719 |
| 3166 | −1.2450 | −0.4252 |
| 3167 | −1.5277 | −0.8136 |
| 3168 | −0.7241 | −0.4416 |
| 3169 | −0.5053 | −0.1762 |
| 3170 | −0.2774 | 0.1031 |
| 3171 | −0.2312 | −0.2834 |
| 3172 | 0.3464 | 0.2509 |
| 3173 | −0.0615 | −0.1089 |
| 3174 | −0.0863 | −0.0523 |
| 3175 | −0.2961 | 0.0501 |
| 3176 | −1.2165 | −0.4332 |
| 3177 | −1.4467 | −0.7979 |
| 3178 | −0.7622 | −0.4362 |
| 3179 | −1.5470 | −0.8870 |
| 3180 | −1.6309 | −0.9422 |
| 3181 | 0.3110 | 1.0091 |
| 3182 | −1.2189 | −0.1928 |
| 3183 | −1.6377 | −0.9052 |
| 3184 | −1.2608 | −0.4924 |
| 3185 | −0.4089 | −0.1479 |
| 3186 | −1.6843 | −0.7709 |
| 3187 | −0.4196 | 0.2258 |
| 3188 | −0.2757 | −0.0805 |
| 3189 | −0.6227 | −0.3051 |
| 3190 | −0.4993 | 0.0297 |
| 3191 | −0.4146 | −0.2337 |
| 3192 | −0.6172 | −0.2926 |
| 3193 | −0.4065 | 0.2214 |
| 3194 | −0.9305 | −0.4781 |
| 3195 | 0.7222 | 0.7256 |
| 3196 | −0.1765 | 0.1603 |
| 3197 | −1.1174 | −0.5726 |
| 3198 | −0.3624 | −0.2735 |
| 3199 | −0.4419 | −0.0944 |
| 3200 | −0.9599 | −0.3779 |
| 3201 | −1.3623 | −0.5538 |
| 3202 | −0.7134 | −0.2438 |
| 3203 | −0.2653 | −0.1483 |
| 3204 | −0.4222 | 0.1532 |
| 3205 | −0.0904 | 0.0000 |
| 3206 | −0.6912 | −0.4357 |
| 3207 | −0.4444 | −0.1814 |
| 3208 | 0.1603 | −0.0410 |
| 3209 | 0.2512 | −0.0580 |
| 3210 | 0.4014 | −0.1544 |
| 3211 | −0.5184 | −0.2894 |
| 3212 | −0.3019 | −0.3769 |
| 3213 | 0.3582 | −0.1970 |
| 3214 | 0.0402 | 0.0218 |
| 3215 | −0.1361 | −0.1799 |
| 3216 | −0.2938 | −0.3356 |
| 3217 | −0.0483 | 0.0935 |
| 3218 | −0.3091 | −0.1700 |
| 3219 | −0.2061 | −0.0907 |
| 3220 | −0.3132 | −0.2378 |
| 3221 | −0.0732 | 0.0267 |
| 3222 | −0.1509 | −0.1241 |
| 3223 | 0.6388 | 0.6740 |
| 3224 | −0.1398 | −0.0764 |
| 3225 | −0.3265 | −0.1962 |
| 3226 | 0.0372 | −0.0264 |
| 3227 | 0.0936 | 0.1591 |
| 3228 | −0.1101 | 0.0757 |
| 3229 | −0.0869 | −0.0397 |
| 3230 | −0.8036 | −0.3790 |
| 3231 | −0.1971 | −0.1186 |
| 3232 | −0.2289 | −0.1483 |
| 3233 | −0.1512 | 0.1710 |
| 3234 | −0.1102 | 0.2761 |
| 3235 | −0.6459 | 0.4398 |
| 3236 | −0.8987 | −0.2954 |
| 3237 | 0.3283 | 0.7435 |
| 3238 | −0.8013 | 0.0096 |
| 3239 | −0.6420 | −0.2563 |
| 3240 | −0.6780 | −0.2798 |
| 3241 | −1.0339 | −0.5114 |
| 3242 | −0.7362 | −0.1432 |
| 3243 | −2.5286 | −1.5930 |
| 3244 | −0.8623 | −0.3292 |
| 3245 | −1.0364 | −0.3680 |
| 3246 | −0.7861 | −0.4232 |
| 3247 | 0.1000 | 0.0769 |
| 3248 | −0.1173 | −0.0413 |
| 3249 | −0.1518 | −0.0069 |
| 3250 | −0.2585 | −0.1758 |
| 3251 | −0.2599 | −0.2256 |
| 3252 | 0.3003 | 0.3741 |
| 3253 | 0.0931 | 0.0056 |
| 3254 | −1.2538 | −0.5527 |
| 3255 | −1.3846 | −0.7316 |
| 3256 | −0.3987 | −0.1798 |
| 3257 | −1.1606 | −0.5933 |
| 3258 | −0.2277 | 0.6652 |
| 3259 | −0.4728 | −0.1899 |
| 3260 | −1.9077 | −0.7874 |
| 3261 | −1.7705 | −0.8829 |
| 3262 | −0.8518 | −0.2210 |
| 3263 | −0.1836 | 0.2494 |
| 3264 | −1.5606 | −0.7171 |
| 3265 | −0.8294 | −0.1546 |
| 3266 | −0.1933 | 0.0878 |
| 3267 | −0.5022 | 0.1007 |
| 3268 | −0.6472 | −0.2745 |
| 3269 | −0.5700 | −0.2469 |
| 3270 | −0.5368 | 0.0313 |
| 3271 | −0.3058 | 0.0662 |
| 3272 | −0.9554 | −0.3724 |
| 3273 | 0.0478 | 0.1511 |
| 3274 | −0.5997 | −0.4512 |
| 3275 | −0.7102 | −0.1341 |
| 3276 | −0.4344 | −0.2913 |
| 3277 | −0.6564 | −0.2087 |
| 3278 | −0.9131 | −0.3402 |
| 3279 | −1.0881 | −0.5730 |
| 3280 | −0.3899 | −0.0133 |
| 3281 | −0.3274 | −0.2099 |
| 3282 | −0.1650 | −0.0922 |
| 3283 | 0.2040 | −0.0634 |
| 3284 | 0.0921 | 0.0261 |
| 3285 | −0.1805 | −0.1135 |
| 3286 | 0.1486 | 0.0127 |
| 3287 | 0.0990 | 0.3949 |
| 3288 | 0.2114 | 0.2833 |
| 3289 | −0.3099 | −0.1482 |
| 3290 | −0.4794 | −0.2858 |
| 3291 | −0.1380 | 0.0129 |
| 3292 | 0.2457 | 0.2287 |
| 3293 | 0.0376 | 0.1233 |
| 3294 | 0.2507 | 0.1959 |
| 3295 | 0.9627 | 1.3754 |
| 3296 | 0.1975 | 0.4383 |
| 3297 | −0.0636 | −0.0953 |
| 3298 | −0.0051 | 0.1238 |
| 3299 | −0.1011 | −0.1423 |
| 3300 | −0.2047 | −0.1775 |
| 3301 | 0.1215 | 0.0730 |
| 3302 | −0.0021 | −0.0055 |
| 3303 | −0.1110 | −0.0867 |
| 3304 | 0.1024 | 0.0244 |
| 3305 | −0.0874 | −0.0071 |
| 3306 | 0.1709 | −0.0268 |
| 3307 | −0.1435 | −0.0171 |
| 3308 | −0.1460 | −0.0564 |
| 3309 | −0.3433 | −0.1020 |
| 3310 | 0.0335 | 0.2450 |
| 3311 | −1.7266 | −0.9350 |
| 3312 | −0.7628 | −0.3291 |
| 3313 | −0.1637 | −0.1701 |
| 3314 | −0.1959 | −0.0276 |
| 3315 | −0.1566 | −0.2424 |
| 3316 | 0.0087 | 0.1330 |
| 3317 | −0.2125 | −0.0344 |
| 3318 | 0.1286 | 0.2256 |
| 3319 | 0.1407 | 0.3080 |
| 3320 | 0.0017 | 0.0141 |
| 3321 | −0.1934 | −0.1629 |
| 3322 | 0.0123 | 0.1363 |
| 3323 | −0.0615 | −0.0465 |
| 3324 | −0.3329 | −0.2224 |
| 3325 | 0.2673 | 0.2911 |
| 3326 | 0.2965 | 0.1062 |
| 3327 | −0.1085 | 0.1041 |
| 3328 | 0.2418 | 0.3614 |
| 3329 | −0.1223 | 0.1349 |
| 3330 | −0.5580 | −0.2829 |
| 3331 | −0.2965 | −0.0249 |
| 3332 | −0.1642 | −0.1712 |
| 3333 | −0.1894 | −0.0493 |
| 3334 | 0.0089 | 0.3469 |
| 3335 | −0.0443 | 0.1667 |
| 3336 | −0.1064 | 0.3599 |
| 3337 | 0.0058 | 0.3173 |
| 3338 | 0.1012 | 0.3787 |
| 3339 | −0.3249 | −0.1124 |
| 3340 | 0.0041 | 0.1095 |
| 3341 | −0.2369 | −0.0245 |
| 3342 | −0.1359 | 0.0205 |
| 3343 | 0.0239 | −0.1785 |
| 3344 | −0.2065 | 0.0451 |
| 3345 | −0.3686 | −0.2144 |
| 3346 | −0.0556 | 0.0326 |
| 3347 | −0.0034 | −0.0777 |
| 3348 | −0.3918 | −0.2598 |
| 3349 | 0.1169 | 0.0718 |
| 3350 | 0.2011 | 0.1090 |
| 3351 | 0.1952 | 0.0993 |
| 3352 | −0.0069 | 0.0273 |
| 3353 | −0.3104 | −0.2498 |
| 3354 | −0.3173 | −0.1654 |
| 3355 | 0.4345 | 0.5069 |
| 3356 | −0.2530 | 0.0221 |
| 3357 | 0.3429 | 0.3979 |
| 3358 | 0.1199 | 0.0532 |
| 3359 | −0.1156 | −0.1410 |
| 3360 | 0.1217 | 0.4870 |
| 3361 | 0.2641 | 0.2933 |
| 3362 | −0.2793 | −0.2661 |
| 3363 | −0.0905 | −0.0442 |
| 3364 | 0.0124 | 0.1125 |
| 3365 | −0.0289 | 0.0489 |
| 3366 | 0.0567 | 0.0723 |
| 3367 | −0.0845 | −0.1613 |
| 3368 | −0.0775 | −0.1692 |
| 3369 | −0.0821 | 0.0659 |
| 3370 | −0.1032 | −0.0300 |
| 3371 | 0.1267 | 0.1648 |
| 3372 | −0.2152 | −0.2285 |
| 3373 | −0.0131 | 0.0466 |
| 3374 | −0.4187 | −0.0983 |
| 3375 | −0.3211 | −0.1103 |
| 3376 | 0.1035 | 0.0352 |
| 3377 | 0.2394 | 0.0875 |
| 3378 | −0.2170 | 0.0367 |
| 3379 | 0.6321 | 0.7869 |
| 3380 | −0.0529 | 0.0122 |
| 3381 | 0.2605 | 0.1699 |
| 3382 | −0.0120 | 0.2825 |
| 3383 | 0.3446 | 0.2396 |
| 3384 | 0.2301 | 0.1138 |
| 3385 | 0.1555 | 0.2009 |
| 3386 | −0.2475 | −0.0450 |
| 3387 | −0.1752 | −0.0094 |
| 3388 | −0.2281 | −0.0269 |
| 3389 | −0.3734 | −0.0695 |
| 3390 | −0.1926 | 0.0413 |
| 3391 | 0.2229 | 0.2883 |
| 3392 | −0.8778 | −0.3497 |
| 3393 | −0.0055 | 0.1300 |
| 3394 | 0.1687 | 0.3511 |
| 3395 | −0.5498 | 0.0737 |
| 3396 | −0.5859 | −0.0805 |
| 3397 | −0.5661 | −0.1748 |
| 3398 | −0.7318 | −0.3400 |
| 3399 | −0.3771 | −0.1687 |
| 3400 | −0.9319 | −0.1577 |
| 3401 | −0.8696 | −0.3717 |
| 3402 | −0.5608 | −0.2061 |
| 3403 | −0.7624 | −0.0910 |
| 3404 | −0.6219 | −0.0357 |
| 3405 | −1.8231 | −0.9065 |
| 3406 | −0.5600 | −0.1328 |
| 3407 | −0.7157 | −0.1934 |
| 3408 | −0.2219 | −0.0521 |
| 3409 | 0.3523 | 0.2468 |
| 3410 | 0.5827 | 0.8577 |
| 3411 | −0.1792 | −0.1491 |
| 3412 | −0.0789 | 0.2508 |
| 3413 | −0.0919 | 0.0581 |
| 3414 | −0.6321 | −0.3010 |
| 3415 | −0.0199 | 0.2168 |
| 3416 | −1.3578 | −0.1074 |
| 3417 | −1.4147 | −0.7307 |
| 3418 | −0.2736 | −0.0535 |
| 3419 | −0.7568 | −0.0674 |
| 3420 | −1.2528 | −0.4814 |
| 3421 | −0.4604 | −0.2260 |
| 3422 | −1.2567 | −0.4108 |
| 3423 | −1.4159 | −0.7229 |
| 3424 | −0.5361 | 0.0017 |
| 3425 | −0.4040 | −0.2998 |
| 3426 | −1.8369 | −1.1365 |
| 3427 | −0.1699 | −0.1922 |
| 3428 | 0.1036 | 0.2169 |
| 3429 | 0.2003 | 0.3173 |
| 3430 | −0.1211 | 0.2013 |
| 3431 | −0.1378 | 0.0908 |
| 3432 | −0.5235 | −0.1654 |
| 3433 | −0.0093 | 0.0811 |
| 3434 | −0.3919 | −0.0171 |
| 3435 | −0.3491 | −0.1702 |
| 3436 | −0.2486 | −0.0474 |
| 3437 | −0.3026 | 0.0605 |
| 3438 | 0.0117 | 0.1561 |
| 3439 | −0.7688 | −0.3225 |
| 3440 | −0.4209 | −0.1694 |
| 3441 | −0.3198 | 0.1408 |
| 3442 | 0.1465 | 0.2436 |
| 3443 | 0.0376 | 0.0952 |
| 3444 | −0.0460 | 0.1093 |
| 3445 | −0.1387 | −0.0593 |
| 3446 | −1.3196 | −0.5134 |
| 3447 | −0.0984 | −0.0301 |
| 3448 | −0.0306 | 0.0171 |
| 3449 | −0.1654 | 0.2429 |
| 3450 | −0.6395 | −0.1631 |
| 3451 | −0.1463 | −0.0198 |
| 3452 | −0.6391 | −0.2697 |
| 3453 | −0.4937 | −0.2199 |
| 3454 | −0.0693 | 0.0612 |
| 3455 | 0.3442 | 0.2163 |
| 3456 | 0.2390 | 0.2447 |
| 3457 | −0.3429 | −0.0750 |
| 3458 | −7.3745 | −5.9937 |
| 3459 | −1.7851 | −0.9890 |
| 3460 | −0.2636 | −0.0484 |
| 3461 | −3.0977 | −2.0777 |
| 3462 | −0.2877 | 0.0686 |
| 3463 | −6.7372 | −6.6300 |
| 3464 | −7.0578 | −6.9688 |
| 3465 | −2.9142 | −2.3904 |
| 3466 | −0.2604 | −0.1799 |
| 3467 | −0.0770 | 0.1278 |
| 3468 | −0.3130 | −0.3243 |
| 3469 | −0.1209 | −0.0712 |
| 3470 | −0.2249 | −0.1187 |
| 3471 | −0.1566 | −0.1059 |
| 3472 | −0.1984 | −0.0975 |
| 3473 | 0.1227 | 0.0603 |
| 3474 | 0.2934 | 0.2998 |
| 3475 | −0.1029 | −0.1788 |
| 3476 | 0.2117 | 0.2663 |
| 3477 | −0.0304 | −0.0821 |
| 3478 | 0.0310 | 0.0949 |
| 3479 | 0.0662 | 0.1999 |
| 3480 | −0.0961 | 0.0490 |
| 3481 | −0.1820 | −0.0806 |
| 3482 | 0.0491 | −0.0610 |
| 3483 | 0.1072 | 0.0660 |
| 3484 | −0.3046 | −0.2405 |
| 3485 | 0.2195 | 0.2661 |
| 3486 | −0.6998 | −0.2431 |
| 3487 | −0.2508 | −0.1478 |
| 3488 | −0.5263 | −0.3600 |
| 3489 | −0.7341 | −0.5099 |
| 3490 | −1.6229 | −0.7069 |
| 3491 | −1.3102 | −0.5617 |
| 3492 | −1.5812 | −0.7399 |
| 3493 | −1.4361 | −0.5874 |
| 3494 | −2.0186 | −0.8282 |
| 3495 | −1.7076 | −0.6839 |
| 3496 | −1.8013 | −0.8024 |
| 3497 | −0.5524 | −0.3481 |
| 3498 | −1.2646 | −0.6822 |
| 3499 | −1.9382 | −1.1565 |
| 3500 | −2.6612 | −1.6674 |
| 3501 | −2.4133 | −1.3353 |
| 3502 | −2.1137 | −1.3538 |
| 3503 | −2.2442 | −1.1592 |
| 3504 | −1.7341 | −0.9315 |
| 3505 | −0.6662 | −0.1042 |
| 3506 | −0.7563 | −0.1913 |
| 3507 | −0.8098 | −0.2350 |
| 3508 | −0.5032 | −0.1595 |
| 3509 | −0.2582 | 0.0262 |
| 3510 | −0.3906 | 0.0897 |
| 3511 | −0.2851 | −0.0764 |
| 3512 | −0.0261 | 0.0610 |
| 3513 | −0.1052 | 0.0931 |
| 3514 | −0.3196 | −0.1720 |
| 3515 | −0.3190 | −0.2229 |
| 3516 | −0.6221 | −0.1924 |
| 3517 | −1.2209 | −0.6594 |
| 3518 | −1.8688 | −0.9356 |
| 3519 | −1.1462 | −0.7795 |
| 3520 | −2.0041 | −1.0151 |
| 3521 | −1.7712 | −0.7010 |
| 3522 | −0.2104 | 0.9835 |
| 3523 | 0.4923 | 0.7954 |
| 3524 | −1.1093 | −0.4603 |
| 3525 | −1.9721 | −1.2051 |
| 3526 | −2.8726 | −1.5430 |
| 3527 | −2.9835 | −1.7603 |
| 3528 | −2.8047 | −1.5229 |
| 3529 | −1.5927 | −0.4979 |
| 3530 | −1.6275 | −0.8578 |
| 3531 | −0.7395 | −0.3344 |
| 3532 | −0.4259 | −0.1069 |
| 3533 | −0.2840 | 0.0671 |
| 3534 | −0.0872 | −0.0409 |
| 3535 | 0.0044 | 0.1133 |
| 3536 | −0.3071 | −0.0952 |
| 3537 | −0.1912 | −0.0794 |
| 3538 | 0.1357 | 0.2275 |
| 3539 | 0.4049 | 0.4807 |
| 3540 | 0.3191 | 0.3877 |
| 3541 | −0.0670 | −0.0732 |
| 3542 | −0.0357 | −0.1296 |
| 3543 | −1.9226 | −0.9763 |
| 3544 | −2.0594 | −1.1209 |
| 3545 | −0.1766 | 0.3661 |
| 3546 | −0.1285 | −0.0182 |
| 3547 | −0.0085 | 0.1802 |
| 3548 | −0.2488 | −0.1044 |
| 3549 | 0.0240 | 0.2932 |
| 3550 | −0.3492 | −0.0432 |
| 3551 | −0.9267 | −0.2694 |
| 3552 | −1.0129 | −0.3493 |
| 3553 | −0.9017 | −0.4108 |
| 3554 | −0.4854 | −0.2118 |
| 3555 | −0.3588 | −0.0785 |
| 3556 | −0.1686 | 0.0217 |
| 3557 | −0.1206 | −0.0503 |
| 3558 | −0.2258 | −0.0206 |
| 3559 | −0.0992 | 0.2240 |
| 3560 | −0.0296 | −0.0301 |
| 3561 | −0.6978 | −0.3727 |
| 3562 | −0.1886 | −0.1335 |
| 3563 | −0.2675 | −0.2049 |
| 3564 | 0.1400 | 0.1143 |
| 3565 | −0.3684 | −0.2679 |
| 3566 | −0.0912 | −0.1272 |
| 3567 | 0.1647 | 0.1701 |
| 3568 | 0.2549 | 0.4486 |
| 3569 | −0.4684 | 0.0186 |
| 3570 | −1.2810 | −0.6467 |
| 3571 | −1.5004 | −0.7471 |
| 3572 | −1.6255 | −0.8515 |
| 3573 | −1.6050 | −0.9353 |
| 3574 | −2.1740 | −1.1812 |
| 3575 | −0.9718 | −0.5020 |
| 3576 | −0.8027 | −0.3189 |
| 3577 | −0.1506 | −0.0606 |
| 3578 | −1.7236 | −1.1256 |
| 3579 | −2.1236 | −1.5141 |
| 3580 | −2.7275 | −1.6364 |
| 3581 | −3.2774 | −2.1109 |
| 3582 | −2.2367 | −1.1165 |
| 3583 | −1.6533 | −0.6486 |
| 3584 | −1.0185 | −0.4380 |
| 3585 | −0.1122 | 0.2742 |
| 3586 | −0.2750 | 0.2113 |
| 3587 | −0.6347 | −0.1979 |
| 3588 | −0.3931 | −0.1860 |
| 3589 | −0.6175 | −0.2544 |
| 3590 | −1.8680 | −1.2824 |
| 3591 | −0.0024 | 0.1526 |
| 3592 | −7.4639 | −6.2221 |
| 3593 | −7.9885 | −6.4635 |
| 3594 | −8.3930 | −9.6810 |
| 3595 | −7.3423 | −10.9782 |
| 3596 | −0.3903 | −0.3416 |
| 3597 | 0.0917 | 0.1494 |
| 3598 | −0.0758 | −0.0618 |
| 3599 | −0.2396 | −0.2441 |
| 3600 | −0.2948 | −0.0989 |
| 3601 | −0.2653 | −0.1860 |
| 3602 | −0.1487 | −0.1682 |
| 3603 | 0.2530 | 0.2161 |
| 3604 | 0.1562 | 0.1653 |
| 3605 | 0.0556 | −0.0740 |
| 3606 | −0.3582 | −0.3250 |
| 3607 | −0.6016 | −0.2498 |
| 3608 | −0.4632 | −0.1732 |
| 3609 | −0.7017 | −0.2571 |
| 3610 | −0.6669 | −0.3597 |
| 3611 | −0.4609 | −0.0806 |
| 3612 | −1.1828 | −0.5130 |
| 3613 | −1.3720 | −0.5901 |
| 3614 | −2.2294 | −1.3354 |
| 3615 | −2.6956 | −1.6841 |
| 3616 | −0.9745 | −0.3097 |
| 3617 | −0.4727 | −0.4828 |
| 3618 | −0.2409 | −0.0700 |
| 3619 | −0.7012 | −0.3244 |
| 3620 | −0.7103 | −0.0184 |
| 3621 | −1.5205 | −0.8541 |
| 3622 | −1.9097 | −1.1174 |
| 3623 | −1.4267 | −0.7179 |
| 3624 | −0.9269 | −0.5197 |
| 3625 | −0.5775 | −0.1805 |
| 3626 | −1.6068 | −0.8562 |
| 3627 | −1.8065 | −0.8846 |
| 3628 | −0.6095 | −0.2797 |
| 3629 | 0.0616 | 0.1545 |
| 3630 | −0.4946 | −0.1218 |
| 3631 | 0.2111 | 0.5455 |
| 3632 | 0.1446 | 0.2120 |
| 3633 | −0.0361 | 0.2558 |
| 3634 | 0.2105 | 0.3505 |
| 3635 | −0.5164 | −0.2773 |
| 3636 | −0.3142 | −0.1470 |
| 3637 | −0.3062 | −0.0815 |
| 3638 | −1.2010 | −0.5013 |
| 3639 | −1.3650 | −0.6889 |
| 3640 | −2.7044 | −1.5048 |
| 3641 | −2.4767 | −1.2990 |
| 3642 | −0.3075 | 0.1915 |
| 3643 | 0.0668 | 0.2320 |
| 3644 | 0.1260 | 0.1088 |
| 3645 | −0.2224 | −0.0350 |
| 3646 | −0.4072 | −0.0328 |
| 3647 | −1.2555 | −0.6835 |
| 3648 | −1.9614 | −0.9218 |
| 3649 | −1.7198 | −0.9177 |
| 3650 | −1.1859 | −0.6095 |
| 3651 | −0.6788 | −0.1107 |
| 3652 | −1.3040 | −0.7265 |
| 3653 | −0.8762 | −0.2100 |
| 3654 | −0.0706 | −0.0031 |
| 3655 | 0.1123 | 0.1012 |
| 3656 | 0.4096 | 0.5286 |
| 3657 | 0.1043 | 0.1039 |
| 3658 | 0.2247 | 0.3261 |
| 3659 | −0.4147 | −0.3101 |
| 3660 | −0.3476 | −0.0225 |
| 3661 | −0.1968 | −0.0928 |
| 3662 | −0.1174 | 0.1090 |
| 3663 | −1.1018 | −0.4812 |
| 3664 | −0.3143 | −0.0155 |
| 3665 | 0.0859 | 0.0522 |
| 3666 | −0.5218 | −0.1111 |
| 3667 | −0.2070 | 0.0362 |
| 3668 | 0.1721 | 0.1037 |
| 3669 | −0.1819 | −0.0326 |
| 3670 | −1.0517 | −0.4065 |
| 3671 | −0.9464 | −0.0715 |
| 3672 | 0.2220 | 0.4830 |
| 3673 | 0.3636 | 0.3177 |
| 3674 | 0.4927 | 0.4113 |
| 3675 | 0.1753 | 0.2096 |
| 3676 | 0.2912 | 0.1367 |
| 3677 | −0.0267 | −0.0441 |
| 3678 | −0.0622 | 0.0076 |
| 3679 | 0.8972 | 0.8312 |
| 3680 | −0.0575 | 0.0481 |
| 3681 | 0.2716 | 0.2170 |
| 3682 | 0.3474 | 0.6009 |
| 3683 | 0.1165 | 0.2648 |
| 3684 | 0.0354 | 0.1638 |
| 3685 | 0.1521 | 0.1534 |
| 3686 | 0.1855 | 0.2316 |
| 3687 | 0.0816 | 0.1675 |
| 3688 | −0.2594 | −0.0299 |
| 3689 | −0.1511 | −0.1117 |
| 3690 | −0.0788 | 0.2959 |
| 3691 | 0.0219 | 0.4376 |
| 3692 | −0.6198 | 0.0010 |
| 3693 | −0.9111 | 0.0283 |
| 3694 | −2.7198 | −1.5187 |
| 3695 | −2.3341 | −1.1304 |
| 3696 | −0.8652 | −0.3453 |
| 3697 | −0.1374 | 0.0439 |
| 3698 | −0.6141 | −0.2269 |
| 3699 | −0.3952 | 0.0503 |
| 3700 | −0.7037 | −0.2627 |
| 3701 | −1.5155 | −0.7281 |
| 3702 | −1.4859 | −0.7755 |
| 3703 | −0.5488 | −0.0770 |
| 3704 | −0.1624 | −0.0285 |
| 3705 | −0.4721 | 0.0344 |
| 3706 | −0.9048 | −0.3789 |
| 3707 | −0.4851 | 0.0210 |
| 3708 | −0.1538 | −0.0593 |
| 3709 | −0.4584 | −0.1921 |
| 3710 | 0.9657 | 0.7010 |
| 3711 | −0.5900 | −0.3670 |
| 3712 | −0.3751 | −0.2187 |
| 3713 | −6.6103 | −6.4389 |
| 3714 | −6.6670 | −5.8711 |
| 3715 | −6.5462 | −6.3747 |
| 3716 | 0.1479 | −0.0674 |
| 3717 | 0.0185 | 0.1212 |
| 3718 | 0.1261 | 0.2565 |
| 3719 | 0.2649 | 0.1810 |
| 3720 | 0.1467 | 0.0603 |
| 3721 | −0.2376 | −0.1994 |
| 3722 | −0.4029 | −0.3422 |
| 3723 | 0.0912 | 0.2361 |
| 3724 | −0.0448 | 0.0067 |
| 3725 | −7.1208 | −6.5508 |
| 3726 | −7.8909 | −7.3410 |
| 3727 | −7.9173 | −6.3129 |
| 3728 | −6.3232 | −6.8299 |
| 3729 | −6.5660 | −6.6576 |
| 3730 | −6.5578 | −6.5881 |
| 3731 | −1.9897 | −1.1980 |
| 3732 | −1.3420 | −0.1297 |
| 3733 | −0.8629 | −0.2536 |
| 3734 | −0.6479 | −0.0343 |
| 3735 | −1.3591 | −0.6919 |
| 3736 | −1.6052 | −0.9177 |
| 3737 | −1.2376 | −0.4101 |
| 3738 | −2.1335 | −1.0905 |
| 3739 | −2.2272 | −0.9022 |
| 3740 | −1.7603 | −0.9709 |
| 3741 | −1.5292 | −0.8834 |
| 3742 | −0.9992 | −0.5166 |
| 3743 | −1.1001 | −0.4502 |
| 3744 | −1.6066 | −0.8165 |
| 3745 | −3.1501 | −2.0481 |
| 3746 | −3.0733 | −1.6838 |
| 3747 | −2.7858 | −1.7811 |
| 3748 | −2.0530 | −1.1040 |
| 3749 | −1.0257 | −0.4796 |
| 3750 | −1.4423 | −0.7901 |
| 3751 | −0.8159 | −0.1649 |
| 3752 | −0.5485 | −0.1426 |
| 3753 | −0.2077 | 0.0230 |
| 3754 | −0.1692 | 0.0353 |
| 3755 | 0.2299 | 0.3595 |
| 3756 | 0.1226 | 0.2551 |
| 3757 | 0.3669 | 0.3405 |
| 3758 | 0.0226 | 0.1316 |
| 3759 | 0.1025 | 0.1716 |
| 3760 | 0.0937 | 0.2427 |
| 3761 | 0.4615 | 0.4891 |
| 3762 | −0.0471 | 0.1277 |
| 3763 | 0.0771 | 0.3126 |
| 3764 | 0.1602 | 0.3812 |
| 3765 | 0.1168 | 0.1601 |
| 3766 | −0.1229 | −0.0133 |
| 3767 | 0.0377 | 0.1236 |
| 3768 | −0.1936 | 0.2087 |
| 3769 | −1.1037 | −0.3663 |
| 3770 | −2.7142 | −1.8371 |
| 3771 | −2.2169 | −0.9507 |
| 3772 | −0.8267 | −0.2781 |
| 3773 | −0.5995 | −0.0810 |
| 3774 | −0.1158 | 0.1724 |
| 3775 | −0.7023 | −0.1228 |
| 3776 | −1.2452 | −0.4765 |
| 3777 | −1.2617 | −0.7049 |
| 3778 | −2.0607 | −0.9821 |
| 3779 | −0.4303 | 0.9917 |
| 3780 | −0.4639 | −0.0857 |
| 3781 | −0.0586 | 0.0715 |
| 3782 | −0.1455 | 0.0497 |
| 3783 | −0.2681 | 0.1055 |
| 3784 | 0.3717 | 0.3063 |
| 3785 | 0.2207 | 0.2138 |
| 3786 | −0.1653 | 0.1069 |
| 3787 | −0.5095 | 0.0159 |
| 3788 | −0.6963 | −0.1975 |
| 3789 | −2.0648 | −1.0341 |
| 3790 | −2.5705 | −1.2881 |
| 3791 | −2.3167 | −1.2264 |
| 3792 | −2.8388 | −1.5957 |
| 3793 | −2.8725 | −1.4941 |
| 3794 | −2.3413 | −1.1979 |
| 3795 | −1.3551 | −0.4832 |
| 3796 | −0.9870 | −0.5305 |
| 3797 | −0.7153 | −0.1909 |
| 3798 | −0.8816 | −0.3397 |
| 3799 | −2.8112 | −1.5518 |
| 3800 | −1.8032 | −0.9632 |
| 3801 | −2.5367 | −1.1941 |
| 3802 | −2.4224 | −1.3335 |
| 3803 | −1.2752 | −0.2312 |
| 3804 | −1.3238 | −0.6241 |
| 3805 | −0.8582 | −0.3499 |
| 3806 | −0.2521 | 0.1802 |
| 3807 | −0.2855 | −0.0192 |
| 3808 | −0.2604 | −0.0882 |
| 3809 | −0.2029 | 0.0489 |
| 3810 | −0.6620 | −0.2028 |
| 3811 | −0.1029 | 0.0875 |
| 3812 | −0.8157 | −0.2993 |
| 3813 | −1.8832 | −0.9071 |
| 3814 | −2.1965 | −1.0238 |
| 3815 | −2.2303 | −1.4157 |
| 3816 | −1.4450 | −0.0178 |
| 3817 | −2.5140 | −1.3709 |
| 3818 | −2.6814 | −1.4115 |
| 3819 | −1.9138 | −0.7965 |
| 3820 | −2.5097 | −1.4805 |
| 3821 | −1.3987 | −0.7231 |
| 3822 | −1.0824 | −0.4571 |
| 3823 | −0.3037 | 0.1448 |
| 3824 | −0.6652 | 0.0205 |
| 3825 | −2.1865 | −1.2341 |
| 3826 | −2.5509 | −1.5239 |
| 3827 | −2.1358 | −1.0643 |
| 3828 | −1.8494 | −0.8651 |
| 3829 | −1.1086 | −0.4576 |
| 3830 | −1.3151 | −0.5997 |
| 3831 | −1.5385 | −0.8916 |
| 3832 | −0.8832 | −0.2915 |
| 3833 | −0.9407 | −0.3956 |
| 3834 | −0.0136 | 0.1605 |
| 3835 | −0.0252 | 0.1395 |
| 3836 | −0.1409 | 0.1251 |
| 3837 | −0.1000 | −0.1398 |
| 3838 | 0.0507 | −0.0084 |
| 3839 | 0.2537 | 0.2821 |
| 3840 | −0.4245 | −0.2666 |
| 3841 | −0.4470 | −0.5817 |
| 3842 | −7.7951 | −7.7392 |
| 3843 | −6.6152 | −6.5507 |
| 3844 | −7.3824 | −6.3879 |
| 3845 | −6.6939 | −8.0370 |
| 3846 | −8.2173 | −7.4610 |
| 3847 | −7.1848 | −7.6763 |
| 3848 | −0.8947 | −0.3952 |
| 3849 | −1.7841 | −1.0846 |
| 3850 | −1.0333 | −0.3654 |
| 3851 | −0.4336 | −0.0154 |
| 3852 | −0.4770 | −0.3016 |
| 3853 | −1.8007 | −0.9576 |
| 3854 | −2.3532 | −1.4240 |
| 3855 | −2.7858 | −1.7034 |
| 3856 | −3.2892 | −2.0858 |
| 3857 | −3.6335 | −2.7189 |
| 3858 | −4.4349 | −2.5291 |
| 3859 | −3.8024 | −2.5555 |
| 3860 | −1.5494 | −0.5047 |
| 3861 | −3.4732 | −2.3159 |
| 3862 | −1.4722 | −0.7757 |
| 3863 | −2.9028 | −1.7105 |
| 3864 | −3.2498 | −1.8531 |
| 3865 | −2.7448 | −1.0525 |
| 3866 | −3.0800 | −1.7711 |
| 3867 | −2.5465 | −1.4106 |
| 3868 | −1.1538 | −0.2917 |
| 3869 | −1.4123 | −0.7039 |
| 3870 | −0.8210 | −0.3623 |
| 3871 | −0.4194 | −0.3083 |
| 3872 | −0.1116 | −0.0424 |
| 3873 | 0.0020 | 0.3486 |
| 3874 | 0.1383 | 0.2687 |
| 3875 | −0.3176 | −0.1227 |
| 3876 | −0.1069 | 0.0395 |
| 3877 | −0.3039 | −0.0814 |
| 3878 | 0.1043 | 0.2540 |
| 3879 | 0.0634 | 0.2149 |
| 3880 | −0.2647 | −0.1246 |
| 3881 | −0.1912 | −0.0254 |
| 3882 | −0.6951 | −0.3121 |
| 3883 | −0.3633 | −0.0565 |
| 3884 | −0.7923 | −0.1811 |
| 3885 | −1.8221 | −1.0672 |
| 3886 | −1.8377 | −1.1566 |
| 3887 | −1.9299 | −1.1633 |
| 3888 | −1.1371 | −0.2829 |
| 3889 | −0.2420 | 0.1446 |
| 3890 | −0.1731 | −0.8035 |
| 3891 | −0.0754 | 0.2170 |
| 3892 | −0.8371 | −0.3460 |
| 3893 | −2.2494 | −1.1168 |
| 3894 | −2.5760 | −1.7004 |
| 3895 | −2.2619 | −1.3856 |
| 3896 | −1.1496 | −0.4850 |
| 3897 | 1.0843 | 1.0330 |
| 3898 | 0.0194 | 0.0300 |
| 3899 | 0.4735 | 0.3391 |
| 3900 | 0.0364 | 0.2375 |
| 3901 | −0.2936 | −0.3552 |
| 3902 | −0.1969 | −0.1804 |
| 3903 | −0.4510 | −0.1950 |
| 3904 | −0.6307 | −0.3177 |
| 3905 | −0.9492 | −0.4200 |
| 3906 | −0.8309 | −0.2319 |
| 3907 | −2.1130 | −1.2277 |
| 3908 | −2.3936 | −1.3696 |
| 3909 | −2.7245 | −1.5341 |
| 3910 | −3.2207 | −1.8024 |
| 3911 | −2.7229 | −1.8116 |
| 3912 | −2.7452 | −1.7118 |
| 3913 | −2.6558 | −1.2485 |
| 3914 | −2.2330 | −1.3629 |
| 3915 | −2.8029 | −1.7141 |
| 3916 | −1.9187 | −1.2206 |
| 3917 | −2.9916 | −1.8797 |
| 3918 | −3.3533 | −2.0066 |
| 3919 | −3.3050 | −1.9791 |
| 3920 | −2.3746 | −1.4180 |
| 3921 | −2.3163 | −1.0773 |
| 3922 | −0.7157 | −0.6205 |
| 3923 | −0.0575 | 0.2491 |
| 3924 | −0.1865 | −0.1292 |
| 3925 | 0.0081 | 0.1496 |
| 3926 | 0.0834 | 0.4999 |
| 3927 | −0.6296 | −0.1794 |
| 3928 | −0.7982 | −0.2766 |
| 3929 | −0.5029 | −0.0635 |
| 3930 | −0.9681 | −0.1932 |
| 3931 | −1.6209 | −0.5626 |
| 3932 | −1.4860 | −0.6959 |
| 3933 | −2.4215 | −1.3238 |
| 3934 | −2.7021 | −1.5688 |
| 3935 | −2.8460 | −1.6477 |
| 3936 | −3.3087 | −1.8582 |
| 3937 | −2.9202 | −1.6205 |
| 3938 | −2.4528 | −1.1929 |
| 3939 | −3.0506 | −1.8012 |
| 3940 | −2.4127 | −1.5068 |
| 3941 | −2.6009 | −1.3663 |
| 3942 | −1.6939 | −0.4220 |
| 3943 | −2.5743 | −1.6360 |
| 3944 | −2.4953 | −1.5113 |
| 3945 | −2.5817 | −1.4304 |
| 3946 | −2.1973 | −1.0842 |
| 3947 | −2.1175 | −1.1388 |
| 3948 | −1.6923 | −1.1109 |
| 3949 | −1.8457 | −0.9609 |
| 3950 | −1.0391 | −0.5563 |
| 3951 | −0.4103 | −0.3085 |
| 3952 | −0.1065 | −0.1810 |
| 3953 | −0.2992 | −0.3197 |
| 3954 | 0.0080 | −0.0273 |
| 3955 | 0.1571 | 0.0018 |
| 3956 | 0.1187 | −0.0014 |
| 3957 | −4.2770 | −2.5534 |
| 3958 | −3.2419 | −2.3449 |
| 3959 | −0.6152 | −0.3664 |
| 3960 | −0.7793 | −0.3715 |
| 3961 | −0.9565 | −0.4858 |
| 3962 | −0.8604 | −0.5104 |
| 3963 | −0.8511 | −0.4197 |
| 3964 | −1.7232 | −0.9323 |
| 3965 | −2.1794 | −1.1737 |
| 3966 | −3.7282 | −2.4069 |
| 3967 | −3.6827 | −2.2868 |
| 3968 | −3.9633 | −2.5074 |
| 3969 | −3.6147 | −2.3600 |
| 3970 | −5.7595 | −4.3250 |
| 3971 | −5.1180 | −3.4529 |
| 3972 | −3.0156 | −1.7906 |
| 3973 | −4.5720 | −2.8892 |
| 3974 | −5.7903 | −3.8463 |
| 3975 | −5.8893 | −4.4369 |
| 3976 | −4.2119 | −2.5864 |
| 3977 | −3.5761 | −1.8017 |
| 3978 | −4.2974 | −2.8132 |
| 3979 | −3.3266 | −2.1330 |
| 3980 | −3.1987 | −2.0847 |
| 3981 | −4.7911 | −3.0516 |
| 3982 | −2.8451 | −1.8240 |
| 3983 | −3.4318 | −2.2881 |
| 3984 | −1.5112 | −1.0627 |
| 3985 | −4.7825 | −3.3026 |
| 3986 | −2.4516 | −1.3520 |
| 3987 | −3.5690 | −2.8254 |
| 3988 | −6.9564 | −6.4631 |
| 3989 | −3.5961 | −2.5577 |
| 3990 | −4.8013 | −3.7384 |
| 3991 | −4.9157 | −3.7048 |
| 3992 | −2.5321 | −1.8533 |
| 3993 | −4.9343 | −3.3363 |
| 3994 | −6.3558 | −3.7381 |
| 3995 | −5.0854 | −3.3609 |
| 3996 | −3.4805 | −2.0429 |
| 3997 | −3.3227 | −2.2239 |
| 3998 | −4.2238 | −2.8769 |
| 3999 | −3.2264 | −1.5717 |
| 4000 | −5.5634 | −4.3255 |
| 4001 | −5.0848 | −4.2353 |
| 4002 | −6.8895 | −6.4243 |
| 4003 | −8.6461 | −7.6267 |
| 4004 | −4.0559 | −2.9363 |
| 4005 | −6.5983 | −5.1467 |
| 4006 | −15.0000 | −6.1749 |
| 4007 | −5.1914 | −3.8524 |
| 4008 | −3.8071 | −2.5748 |
| 4009 | −4.6349 | −2.8150 |
| 4010 | −3.6521 | −2.1964 |
| 4011 | −4.6661 | −2.7536 |
| 4012 | −5.0217 | −3.1467 |
| 4013 | −3.7002 | −2.1919 |
| 4014 | −4.0916 | −2.5890 |
| 4015 | −2.8705 | −1.4735 |
| 4016 | −3.8946 | −2.2092 |
| 4017 | −5.2073 | −3.4416 |
| 4018 | −3.9015 | −2.7375 |
| 4019 | −5.2557 | −4.5279 |
| 4020 | −3.2722 | −1.8281 |
| 4021 | −2.9829 | −1.7571 |
| 4022 | −7.9421 | −5.0862 |
| 4023 | −3.4527 | −2.2656 |
| 4024 | −5.3789 | −4.4139 |
| 4025 | −5.6407 | −4.0497 |
| 4026 | −4.8675 | −3.3783 |
| 4027 | −4.0998 | −3.2053 |
| 4028 | −4.5055 | −2.8720 |
| 4029 | −3.2422 | −2.5015 |
| 4030 | −5.9397 | −4.6163 |
| 4031 | −4.3377 | −2.3926 |
| 4032 | −7.8855 | −5.3218 |
| 4033 | −6.6498 | −5.3354 |
| 4034 | −5.6591 | −3.7222 |
| 4035 | −4.2866 | −2.3426 |
| 4036 | −4.1994 | −2.6555 |
| 4037 | −0.5867 | −0.1385 |
| 4038 | −0.4394 | 0.0374 |
| 4039 | −0.7508 | −0.3047 |
| 4040 | 0.0941 | 0.2647 |
| 4041 | −0.6200 | −0.2123 |
| 4042 | −0.0213 | 0.3888 |
| 4043 | −0.9611 | −0.4077 |
| 4044 | 0.0388 | 0.3442 |
| 4045 | −1.1953 | −0.7035 |
| 4046 | −0.2093 | 0.0686 |
| 4047 | −0.3223 | −0.2660 |
| 4048 | −0.4455 | −0.1354 |
| 4049 | −0.1302 | −0.0055 |
| 4050 | −0.2372 | −0.1959 |
| 4051 | −0.1709 | −0.2292 |
| 4052 | 0.8826 | 0.5588 |
| 4053 | −0.0737 | 0.3054 |
| 4054 | −0.6169 | 0.6621 |
| 4055 | −0.1614 | 0.2482 |
| 4056 | −0.5976 | −0.2513 |
| 4057 | −0.7230 | −0.2977 |
| 4058 | −0.5139 | −0.0925 |
| 4059 | −0.6313 | −0.4020 |
| 4060 | −0.6281 | −0.2748 |
| 4061 | −0.6786 | −0.4674 |
| 4062 | −0.5161 | −0.2033 |
| 4063 | −0.6426 | −0.4339 |
| 4064 | −0.0836 | −0.0126 |
| 4065 | −0.1998 | −0.0269 |
| 4066 | −0.1543 | −0.2367 |
| 4067 | −0.4159 | −0.2229 |
| 4068 | −0.3122 | 0.0737 |
| 4069 | −0.6880 | −0.3456 |
| 4070 | −0.7606 | −0.3950 |
| 4071 | −0.5957 | −0.3650 |
| 4072 | −0.2804 | −0.1135 |
| 4073 | −1.2219 | −0.5064 |
| 4074 | −0.9748 | −0.4882 |
| 4075 | −0.6093 | −0.3414 |
| 4076 | −1.6243 | −0.7931 |
| 4077 | −2.4821 | −1.3362 |
| 4078 | −7.5388 | −4.9923 |
| 4079 | −7.5635 | −5.7196 |
| 4080 | −3.5944 | −2.5715 |
| 4081 | −4.7852 | −2.6058 |
| 4082 | −0.2801 | −0.1887 |
| 4083 | −0.6145 | −0.0889 |
| 4084 | −3.5454 | −1.9086 |
| 4085 | −3.6858 | −1.9000 |
| 4086 | −1.8691 | −0.7719 |
| 4087 | −2.9235 | −1.6448 |
| 4088 | −2.0571 | −1.2492 |
| 4089 | −2.4869 | −1.3495 |
| 4090 | −1.2984 | −0.6806 |
| 4091 | −0.8234 | −0.5493 |
| 4092 | −0.0748 | −0.0459 |
| 4093 | −1.0120 | −0.6734 |
| 4094 | −1.4180 | −0.7176 |
| 4095 | −3.1132 | −1.9571 |
| 4096 | −4.6135 | −2.7551 |
| 4097 | −7.3866 | −5.5293 |
| 4098 | −9.3999 | −6.3354 |
| 4099 | −4.4924 | −3.1233 |
| 4100 | −0.7228 | −0.3319 |
| 4101 | −4.8721 | −2.8886 |
| 4102 | −9.1119 | −6.8701 |
| 4103 | −9.1708 | −7.4144 |
| 4104 | −10.3534 | −9.4451 |
| 4105 | −8.1852 | −10.0138 |
| 4106 | −3.3964 | −1.5781 |
| 4107 | −1.6429 | −0.9812 |
| 4108 | −1.1936 | −0.5794 |
| 4109 | −1.8197 | −0.7503 |
| 4110 | −1.3845 | −0.5896 |
| 4111 | −2.8410 | −1.5967 |
| 4112 | −1.4996 | −0.7388 |
| 4113 | −1.5744 | −1.0508 |
| 4114 | 0.1891 | 0.3493 |
| 4115 | −0.2963 | −0.1535 |
| 4116 | −0.5279 | −0.2648 |
| 4117 | −2.4876 | −1.2704 |
| 4118 | −8.0899 | −5.7091 |
| 4119 | −3.9825 | −2.0838 |
| 4120 | −1.4939 | −0.6887 |
| 4121 | −0.5932 | −0.2624 |
| 4122 | −0.5714 | −0.2354 |
| 4123 | −0.9800 | −0.1823 |
| 4124 | −0.1340 | −0.0585 |
| 4125 | −0.2942 | −0.0188 |
| 4126 | −0.6273 | −0.3336 |
| 4127 | −1.0036 | 0.0136 |
| 4128 | −1.6053 | −0.7043 |
| 4129 | −2.7858 | −1.5551 |
| 4130 | −5.2728 | −3.0045 |
| 4131 | −5.5197 | −3.8659 |
| 4132 | −0.5016 | −0.1254 |
| 4133 | −0.8077 | −0.4151 |
| 4134 | −0.4514 | 0.0587 |
| 4135 | −2.4424 | −1.6148 |
| 4136 | −3.9106 | −2.0814 |
| 4137 | −3.2782 | −1.7224 |
| 4138 | −7.6419 | −7.1810 |
| 4139 | −8.9810 | −7.2247 |
| 4140 | −8.1018 | −7.4449 |
| 4141 | −0.3868 | −0.0189 |
| 4142 | −1.7988 | −0.8596 |
| 4143 | −6.9247 | −6.8845 |
| 4144 | −0.8343 | −0.5536 |
| 4145 | −7.0229 | −5.8863 |
| 4146 | −1.3126 | −0.9575 |
| 4147 | −5.7091 | −6.9609 |
| 4148 | −8.0609 | −5.6524 |
| 4149 | −2.6741 | −1.7829 |
| 4150 | −4.7610 | −4.0261 |
| 4151 | −0.2993 | −0.3204 |
| 4152 | −1.7133 | −1.0255 |
| 4153 | −2.4119 | −1.3197 |
| 4154 | −2.5067 | −1.8653 |
| 4155 | −3.4838 | −2.1707 |
| 4156 | −3.7982 | −2.3365 |
| 4157 | −3.8067 | −2.4165 |
| 4158 | −3.2825 | −2.0355 |
| 4159 | −2.3802 | −1.2325 |
| 4160 | −0.6672 | −0.1661 |
| 4161 | −2.7418 | −1.7506 |
| 4162 | −5.4951 | −4.1905 |
| 4163 | −6.9981 | −4.7910 |
| 4164 | −7.4257 | −5.4888 |
| 4165 | −7.1841 | −6.5102 |
| 4166 | −8.9882 | −5.5437 |
| 4167 | −6.3946 | −5.6668 |
| 4168 | −7.2991 | −6.1277 |
| 4169 | −6.5179 | −4.6685 |
| 4170 | −3.5445 | −2.4481 |
| 4171 | −4.4952 | −4.4211 |
| 4172 | −4.6834 | −4.0124 |
| 4173 | −5.6052 | −3.6136 |
| 4174 | −5.6899 | −3.8132 |
| 4175 | −6.3603 | −5.2273 |
| 4176 | −6.0123 | −4.3598 |
| 4177 | −5.7591 | −3.3904 |
| 4178 | −5.0021 | −3.6083 |
| 4179 | −3.9751 | −2.1187 |
| 4180 | −3.6606 | −2.1447 |
| 4181 | −4.3178 | −2.8447 |
| 4182 | −5.8759 | −3.3404 |
| 4183 | −3.6016 | −2.3733 |
| 4184 | −2.7036 | −1.5494 |
| 4185 | −2.3867 | −1.3141 |
| 4186 | −0.4156 | −0.0812 |
| 4187 | −2.8466 | −1.7705 |
| 4188 | −5.0731 | −3.4696 |
| 4189 | −5.6188 | −4.0734 |
| 4190 | −5.9523 | −4.5810 |
| 4191 | −8.2778 | −5.8168 |
| 4192 | −6.2424 | −4.1052 |
| 4193 | −4.5717 | −2.6943 |
| 4194 | −1.1539 | −0.4645 |
| 4195 | −1.3774 | −0.7380 |
| 4196 | −4.4779 | −2.8896 |
| 4197 | −6.8045 | −6.0767 |
| 4198 | −8.5362 | −6.9053 |
| 4199 | −10.0015 | −7.3707 |
| 4200 | −8.1663 | −7.2579 |
| 4201 | −8.6062 | −8.1129 |
| 4202 | −8.5856 | −7.8292 |
| 4203 | −7.3784 | −6.1481 |
| 4204 | −7.2603 | −5.0533 |
| 4205 | −7.1605 | −5.7411 |
| 4206 | −6.5793 | −5.4410 |
| 4207 | −6.7388 | −5.5674 |
| 4208 | −6.5820 | −5.0287 |
| 4209 | −8.3013 | −5.5719 |
| 4210 | −10.5450 | −7.1256 |
| 4211 | −8.5315 | −7.4532 |
| 4212 | −9.2981 | −10.1267 |
| 4213 | −11.0468 | −7.7054 |
| 4214 | −9.2545 | −6.3282 |
| 4215 | −6.2852 | −4.7993 |
| 4216 | −6.0291 | −3.6251 |
| 4217 | −4.3772 | −2.3729 |
| 4218 | −3.4461 | −2.0312 |
| 4219 | −3.3663 | −1.8611 |
| 4220 | −2.1677 | −1.2129 |
| 4221 | −4.1013 | −2.7563 |
| 4222 | −3.9280 | −2.5983 |
| 4223 | −4.0370 | −2.7000 |
| 4224 | −4.2518 | −3.0081 |
| 4225 | −4.7767 | −2.6367 |
| 4226 | −2.5234 | −1.4724 |
| 4227 | −3.1750 | −2.1840 |
| 4228 | −3.0882 | −1.9811 |
| 4229 | −3.4769 | −2.1071 |
| 4230 | −4.2505 | −2.7741 |
| 4231 | −2.7144 | −1.7127 |
| 4232 | −1.3113 | −0.4433 |
| 4233 | −5.9920 | −4.4421 |
| 4234 | −8.3474 | −6.2584 |
| 4235 | −8.6983 | −6.7196 |
| 4236 | −7.3016 | −6.3417 |
| 4237 | −1.7008 | −0.7549 |
| 4238 | −3.2926 | −1.9782 |
| 4239 | −4.9849 | −3.1806 |
| 4240 | −4.6550 | −3.4998 |
| 4241 | −5.0363 | −3.6425 |
| 4242 | 0.0887 | 0.0823 |
| 4243 | −0.0654 | −0.1674 |
| 4244 | −0.4098 | −0.2030 |
| 4245 | −0.4623 | −0.0904 |
| 4246 | −0.8455 | −0.3030 |
| 4247 | −0.9395 | −0.5686 |
| 4248 | −5.7367 | −4.4057 |
| 4249 | −1.4331 | −0.5754 |
| 4250 | −1.2159 | −0.4522 |
| 4251 | −8.6796 | −5.1390 |
| 4252 | −6.1987 | −5.0590 |
| 4253 | −6.8613 | −6.8419 |
| 4254 | −4.2232 | −3.2601 |
| 4255 | −2.0656 | −1.0923 |
| 4256 | −1.8605 | −0.9405 |
| 4257 | −5.3148 | −4.5783 |
| 4258 | −3.0681 | −1.8346 |
| 4259 | −4.9889 | −3.0140 |
| 4260 | −7.1633 | −4.4339 |
| 4261 | −4.9989 | −3.5511 |
| 4262 | −6.9439 | −5.8396 |
| 4263 | −6.6411 | −5.3745 |
| 4264 | −6.4560 | −4.2666 |
| 4265 | −2.7336 | −1.8293 |
| 4266 | −0.0882 | 0.0523 |
| 4267 | −0.3627 | −0.2952 |
| 4268 | −0.2184 | −0.1239 |
| 4269 | 0.1647 | 0.0885 |
| 4270 | 0.5787 | 0.7525 |
| 4271 | 0.1581 | 0.1731 |
| 4272 | −0.2887 | −0.3198 |
| 4273 | 0.1893 | −0.0354 |
| 4274 | 0.1482 | 0.0429 |
| 4275 | −0.0734 | −0.1184 |
| 4276 | 0.0515 | −0.0510 |
| 4277 | 0.3467 | 0.2425 |
| 4278 | −0.0413 | −0.0977 |
| 4279 | −0.1681 | −0.0926 |
| 4280 | −0.4317 | −0.2283 |
| 4281 | −1.2357 | −0.3548 |
| 4282 | −1.3706 | −0.6826 |
| 4283 | −1.7344 | −0.9155 |
| 4284 | −2.3167 | −1.1726 |
| 4285 | −2.8847 | −1.5462 |
| 4286 | −2.5894 | −1.5156 |
| 4287 | −2.5242 | −1.2164 |
| 4288 | −2.5027 | −1.3552 |
| 4289 | −2.9463 | −1.5414 |
| 4290 | −2.5669 | −1.4039 |
| 4291 | −2.8592 | −1.5864 |
| 4292 | −2.8346 | −1.6958 |
| 4293 | −3.1266 | −1.8493 |
| 4294 | −2.9827 | −1.5558 |
| 4295 | −3.5692 | −1.6892 |
| 4296 | −2.9646 | −1.6460 |
| 4297 | −3.1527 | −1.6093 |
| 4298 | −3.1710 | −1.9017 |
| 4299 | −3.1493 | −2.1030 |
| 4300 | −3.0906 | −1.8630 |
| 4301 | −3.3345 | −1.9880 |
| 4302 | −3.2093 | −1.9537 |
| 4303 | −3.0574 | −1.8476 |
| 4304 | −3.1651 | −1.7519 |
| 4305 | −3.0836 | −1.7950 |
| 4306 | −3.2920 | −1.6702 |
| 4307 | −3.9095 | −2.2168 |
| 4308 | −5.1460 | −2.8286 |
| 4309 | −5.1286 | −3.2552 |
| 4310 | −5.3711 | −3.8778 |
| 4311 | −6.9313 | −5.0754 |
| 4312 | −7.0657 | −5.2280 |
| 4313 | −6.3463 | −4.0456 |
| 4314 | 6.7799 | −5.3943 |
| 4315 | −7.3159 | −5.1026 |
| 4316 | −8.6164 | −6.0824 |
| 4317 | −8.2670 | −6.0314 |
| 4318 | −9.2838 | −6.5274 |
| 4319 | −9.3181 | −5.8836 |
| 4320 | −6.6746 | −5.4658 |
| 4321 | −9.1124 | −4.8749 |
| 4322 | −8.0568 | −6.1077 |
| 4323 | −8.9872 | −6.1153 |
| 4324 | −6.9138 | −5.7728 |
| 4325 | −7.1361 | −4.5153 |
| 4326 | −7.2192 | −5.2784 |
| 4327 | −7.0939 | −6.0220 |
| 4328 | −7.1006 | −4.7979 |
| 4329 | −7.6235 | −4.9840 |
| 4330 | −6.8873 | −4.7544 |
| 4331 | −6.6799 | −5.0611 |
| 4332 | −6.5452 | −4.7704 |
| 4333 | −5.2359 | −3.4795 |
| 4334 | −7.0448 | −5.6510 |
| 4335 | −7.9245 | −5.6461 |
| 4336 | −7.4728 | −5.6493 |
| 4337 | −8.2866 | −6.1152 |
| 4338 | −7.3930 | −5.4281 |
| 4339 | −7.8563 | −5.2698 |
| 4340 | −6.8064 | −5.2364 |
| 4341 | −7.7156 | −5.1905 |
| 4342 | −7.3397 | −5.6593 |
| 4343 | −7.4485 | −5.7971 |
| 4344 | −7.3961 | −5.5120 |
| 4345 | −7.8495 | −6.0260 |
| 4346 | −7.8940 | −6.1377 |
| 4347 | −8.3984 | −6.1395 |
| 4348 | −7.1395 | −6.3120 |
| 4349 | −7.7741 | −5.9550 |
| 4350 | −7.5347 | −6.5978 |
| 4351 | −7.8147 | −6.3732 |
| 4352 | −7.9215 | −6.1651 |
| 4353 | −8.1969 | −5.9000 |
| 4354 | −7.8234 | −5.9857 |
| 4355 | −7.6703 | −5.8208 |
| 4356 | −7.7217 | −6.1810 |
| 4357 | −7.1485 | −6.6445 |
| 4358 | −7.4051 | −5.8913 |
| 4359 | −8.0773 | −6.2108 |
| 4360 | −7.6286 | −6.7314 |
| 4361 | −8.5862 | −6.2994 |
| 4362 | −9.4599 | −7.0661 |
| 4363 | −8.5372 | −7.7284 |
| 4364 | −10.0959 | −8.4651 |
| 4365 | −10.8159 | −9.4745 |
| 4366 | −11.5988 | −11.4273 |
| 4367 | −10.9058 | −9.4124 |
| 4368 | −12.5255 | −12.3540 |
| 4369 | −10.2981 | −12.1267 |
| 4370 | −11.6616 | −15.0000 |
| 4371 | −12.3976 | −11.2262 |
| 4372 | −9.4886 | −11.9021 |
| 4373 | −10.7323 | −11.5609 |
| 4374 | −11.0354 | −11.8640 |
| 4375 | −15.0000 | −8.7991 |
| 4376 | −9.6562 | −10.0697 |
| 4377 | −15.0000 | −9.7136 |
| 4378 | −0.0928 | 0.1697 |
| 4379 | −0.0251 | 0.2248 |
| 4380 | 0.0893 | 0.2538 |
| 4381 | −0.1069 | 0.1382 |
| 4382 | −0.2477 | 0.0638 |
| 4383 | −0.4002 | 0.0274 |
| 4384 | −0.5858 | −0.1915 |
| 4385 | 0.0916 | 0.4503 |
| 4386 | 0.2029 | 0.4486 |
| 4387 | −0.2848 | −0.0601 |
| 4388 | −0.2576 | 0.1287 |
| 4389 | −0.1256 | 0.1868 |
| 4390 | −0.5482 | −0.1718 |
| 4391 | −0.5317 | 0.0013 |
| 4392 | 0.2628 | 0.3622 |
| 4393 | 0.4406 | 0.9444 |
| 4394 | −0.3541 | −0.1041 |
| 4395 | −0.6106 | −0.4553 |
| 4396 | −0.9846 | −0.1801 |
| 4397 | −0.1535 | 0.2033 |
| 4398 | −0.1171 | 0.2453 |
| 4399 | −0.0859 | 0.2548 |
| 4400 | −0.8444 | −0.0676 |
| 4401 | −0.4879 | 0.0232 |
| 4402 | −0.5299 | −0.2444 |
| 4403 | −0.5009 | −0.1025 |
| 4404 | 0.0003 | 0.1529 |
| 4405 | 0.2422 | 0.2800 |
| 4406 | −0.5640 | −0.0561 |
| 4407 | −0.4763 | −0.2973 |
| 4408 | −0.2658 | −0.2175 |
| 4409 | −0.0299 | 0.1849 |
| 4410 | 0.2592 | 0.3388 |
| 4411 | −0.0641 | 0.1207 |
| 4412 | 0.1802 | 0.3054 |
| 4413 | 0.2669 | −0.0556 |
| 4414 | −0.3153 | 0.1862 |
| 4415 | −0.6194 | −0.0127 |
| 4416 | −0.3937 | 0.2567 |
| 4417 | 0.1141 | 0.6298 |
| 4418 | −0.6399 | −0.1898 |
| 4419 | 0.5921 | −0.2310 |
| 4420 | −0.2786 | 0.2818 |
| 4421 | −0.2468 | 0.2338 |
| 4422 | 0.1563 | 0.3611 |
| 4423 | −0.4409 | −0.2822 |
| 4424 | −0.4965 | 0.2816 |
| 4425 | −0.4324 | 0.2135 |
| 4426 | −1.0210 | −0.5078 |
| 4427 | −0.4199 | −0.0059 |
| 4428 | −0.6114 | −0.2296 |
| 4429 | −0.1407 | 0.1940 |
| 4430 | −0.3626 | 0.0942 |
| 4431 | −0.9248 | −0.3784 |
| 4432 | −1.2743 | −0.5287 |
| 4433 | −0.3835 | 0.2901 |
| 4434 | −0.4619 | 0.3310 |
| 4435 | −0.8648 | −0.2030 |
| 4436 | −1.3171 | −0.6714 |
| 4437 | −0.8105 | −0.1554 |
| 4438 | −0.9386 | −0.1473 |
| 4439 | −0.3446 | −0.0717 |
| 4440 | −0.7553 | −0.5013 |
| 4441 | −0.4459 | −0.1539 |
| 4442 | −1.2869 | −0.4868 |
| 4443 | −0.3469 | −0.0234 |
| 4444 | −0.1531 | 0.0689 |
| 4445 | 0.0781 | 0.2614 |
| 4446 | −0.3784 | −0.0855 |
| 4447 | −0.0805 | 0.1194 |
| 4448 | −0.4057 | −0.0809 |
| 4449 | −0.2716 | 0.1137 |
| 4450 | −0.8925 | −0.5200 |
| 4451 | −0.4112 | 0.0335 |
| 4452 | −0.6856 | −0.2091 |
| 4453 | −0.8151 | −0.3294 |
| 4454 | −0.5609 | −0.2483 |
| 4455 | −0.5952 | 0.0039 |
| 4456 | −1.2291 | −0.4587 |
| 4457 | −0.4150 | 0.2526 |
| 4458 | −0.4832 | 0.0149 |
| 4459 | −0.6890 | −0.0668 |
| 4460 | −1.1077 | −0.5728 |
| 4461 | −1.3577 | −0.5443 |
| 4462 | −1.1894 | −0.3917 |
| 4463 | −0.8944 | −0.3646 |
| 4464 | −0.8404 | −0.6107 |
| 4465 | −0.9863 | −0.4765 |
| 4466 | −1.0465 | −0.6295 |
| 4467 | −1.2109 | −0.5278 |
| 4468 | −1.7276 | −1.0368 |
| 4469 | −0.8500 | −0.2302 |
| 4470 | −0.8042 | −0.1729 |
| 4471 | 0.9338 | −0.2728 |
| 4472 | −1.5495 | −0.6623 |
| 4473 | −1.9489 | −1.0847 |
| 4474 | −1.2539 | −0.6980 |
| 4475 | −0.5823 | −0.1411 |
| 4476 | −0.7785 | −0.6120 |
| 4477 | −0.4596 | −0.2037 |
| 4478 | −1.1086 | −0.3935 |
| 4479 | −0.9981 | −0.5321 |
| 4480 | −0.4792 | 0.2191 |
| 4481 | −0.4174 | −0.0481 |
| 4482 | −0.4710 | −0.2168 |
| 4483 | 0.2574 | 0.7933 |
| 4484 | −0.4876 | −0.2359 |
| 4485 | −0.8438 | −0.5064 |
| 4486 | −0.0597 | 0.2937 |
| 4487 | −0.0668 | 0.4310 |
| 4488 | −0.0075 | 0.2802 |
| 4489 | −0.1956 | 0.2812 |
| 4490 | −0.0306 | 0.2927 |
| 4491 | −0.5503 | 0.0206 |
| 4492 | −0.2502 | 0.1515 |
| 4493 | −0.2575 | 0.2769 |
| 4494 | 0.0050 | 0.2684 |
| 4495 | −0.2255 | 0.2695 |
| 4496 | −0.0617 | 0.3281 |
| 4497 | −0.3405 | 0.0236 |
| 4498 | −0.7789 | −0.3568 |
| 4499 | −0.2473 | 0.3700 |
| 4500 | −0.3735 | −0.3020 |
| 4501 | −0.2268 | −0.0706 |
| 4502 | −0.5106 | −0.2395 |
| 4503 | −0.3317 | 0.1984 |
| 4504 | −1.2502 | −0.5835 |
| 4505 | −0.8524 | −0.1787 |
| 4506 | −0.3267 | −0.0736 |
| 4507 | −0.5326 | 0.0119 |
| 4508 | −1.2168 | −0.4554 |
| 4509 | −0.5952 | −0.0832 |
| 4510 | −0.5800 | −0.2684 |
| 4511 | −0.7149 | −0.3167 |
| 4512 | −0.3789 | −0.0173 |
| 4513 | −0.1780 | −0.0380 |
| 4514 | −1.2420 | −0.6912 |
| 4515 | −0.2325 | 0.0433 |
| 4516 | −0.0582 | 0.2535 |
| 4517 | 0.7464 | 1.0213 |
| 4518 | 0.2554 | 0.3988 |
| 4519 | 0.0968 | 0.2240 |
| 4520 | −0.3460 | −0.1079 |
| 4521 | −0.1834 | 0.1124 |
| 4522 | 0.4059 | 0.0557 |
| 4523 | −0.5902 | −0.1390 |
| 4524 | −0.4918 | −0.0294 |
| 4525 | −0.7562 | −0.2440 |
| 4526 | −0.7892 | −0.1810 |
| 4527 | −0.9519 | −0.2061 |
| 4528 | −0.7984 | −0.3081 |
| 4529 | −0.8061 | −0.2020 |
| 4530 | −0.5900 | −0.0788 |
| 4531 | 0.8137 | −0.1631 |
| 4532 | −0.4139 | 0.0775 |
| 4533 | −1.1626 | −0.4566 |
| 4534 | −1.1039 | −0.4323 |
| 4535 | −0.8349 | −0.4786 |
| 4536 | −0.4696 | −0.1873 |
| 4537 | −0.7593 | −0.4944 |
| 4538 | −1.0887 | −0.5375 |
| 4539 | −1.2355 | −0.4869 |
| 4540 | −1.1856 | −0.4518 |
| 4541 | −1.1643 | −0.3410 |
| 4542 | −0.9590 | −0.3608 |
| 4543 | −0.8976 | −0.3216 |
| 4544 | −1.0774 | −0.2992 |
| 4545 | −1.8020 | −1.0098 |
| 4546 | −0.9263 | −0.4451 |
| 4547 | −0.9774 | −0.6273 |
| 4548 | −0.9892 | −0.5318 |
| 4549 | −0.1300 | 0.0608 |
| 4550 | −1.2471 | −0.4383 |
| 4551 | −0.7886 | −0.4694 |
| 4552 | −0.5649 | −0.2256 |
| 4553 | −0.5073 | −0.1512 |
| 4554 | −0.3131 | −0.0067 |
| 4555 | 0.1132 | 0.8137 |
| 4556 | −0.7470 | −0.5433 |
| 4557 | −0.9315 | −0.4381 |
| 4558 | −0.1049 | 0.1342 |
| 4559 | 0.2612 | 0.3757 |
| 4560 | −0.1107 | 0.1276 |
| 4561 | −0.1799 | 0.1240 |
| 4562 | 0.1302 | 0.3577 |
| 4563 | −0.3948 | −0.0947 |
| 4564 | −0.3401 | 0.0482 |
| 4565 | −0.1454 | 0.2078 |
| 4566 | −0.2097 | −0.0351 |
| 4567 | −0.1966 | 0.0107 |
| 4568 | −0.1539 | 0.4095 |
| 4569 | 0.4565 | 0.9229 |
| 4570 | −0.5050 | −0.1828 |
| 4571 | −0.3595 | −0.1506 |
| 4572 | −0.2938 | 0.0304 |
| 4573 | −0.2609 | −0.0050 |
| 4574 | −0.5506 | −0.2852 |
| 4575 | −0.3034 | 0.0140 |
| 4576 | −0.9504 | −0.4560 |
| 4577 | −0.7329 | −0.3105 |
| 4578 | −0.4157 | 0.0093 |
| 4579 | −0.4979 | 0.0034 |
| 4580 | −0.8566 | −0.4617 |
| 4581 | −0.9013 | −0.3083 |
| 4582 | −0.7945 | −0.5184 |
| 4583 | 0.2312 | 0.2493 |
| 4584 | −0.3961 | −0.2553 |
| 4585 | −0.5433 | 0.0358 |
| 4586 | −0.3481 | −0.0839 |
| 4587 | −0.4486 | −0.1328 |
| 4588 | −0.1857 | 0.0088 |
| 4589 | 0.2189 | 0.1929 |
| 4590 | 0.4798 | 0.5300 |
| 4591 | −0.1226 | −0.0760 |
| 4592 | −0.4566 | −0.1437 |
| 4593 | −8.3927 | −9.3367 |
| 4594 | −4.5421 | −2.6510 |
| 4595 | −3.1208 | −1.8725 |
| 4596 | −8.7566 | −11.5852 |
| 4597 | −15.0000 | −8.2338 |
| 4598 | −8.1118 | −5.8335 |
| 4599 | −11.8058 | −11.6344 |
| 4600 | −7.7253 | −5.3663 |
| 4601 | −3.4032 | −1.8883 |
| 4602 | −3.0625 | −1.9392 |
| 4603 | −7.3621 | −9.1907 |
| 4604 | −8.2431 | −8.6566 |
| 4605 | −7.6721 | −4.5938 |
| 4606 | −8.3143 | −8.7279 |
| 4607 | −3.4931 | −1.6561 |
| 4608 | −2.7917 | −1.2435 |
| 4609 | −4.0705 | −2.1201 |
| 4610 | −2.8478 | −1.6354 |
| 4611 | −3.3968 | −1.7887 |
| 4612 | −2.9980 | −1.6567 |
| 4613 | −3.6085 | −2.1055 |
| 4614 | −3.3854 | −2.3520 |
| 4615 | −4.6649 | −2.6861 |
| 4616 | −3.8048 | −2.2184 |
| 4617 | −3.5524 | −1.9691 |
| 4618 | −3.7235 | −2.1103 |
| 4619 | −4.1942 | −2.0228 |
| 4620 | −4.5216 | −2.6159 |
| 4621 | −4.9591 | −3.6842 |
| 4622 | −4.5748 | −2.3500 |
| 4623 | −4.1324 | −2.8369 |
| 4624 | −3.9852 | −2.5375 |
| 4625 | −3.3849 | −1.7604 |
| 4626 | −3.2030 | −1.5389 |
| 4627 | −4.3883 | −2.5741 |
| 4628 | −4.2066 | −2.1698 |
| 4629 | −3.4566 | −1.8250 |
| 4630 | −3.0797 | −1.7268 |
| 4631 | −4.2604 | −2.1355 |
| 4632 | −4.5075 | −2.6036 |
| 4633 | −4.9475 | −3.1968 |
| 4634 | −4.5765 | −2.5791 |
| 4635 | −4.4585 | −2.5478 |
| 4636 | −4.0757 | −2.4245 |
| 4637 | −3.4836 | −1.8664 |
| 4638 | −3.3376 | −2.1104 |
| 4639 | −3.8391 | −2.3916 |
| 4640 | −3.2730 | −1.7013 |
| 4641 | −3.5346 | −1.5280 |
| 4642 | −4.2236 | −3.0402 |
| 4643 | −6.3577 | −4.0488 |
| 4644 | −6.8833 | −10.1714 |
| 4645 | −7.6141 | −4.4427 |
| 4646 | −8.2277 | −15.0000 |
| 4647 | −7.3042 | −8.1328 |
| 4648 | −11.1685 | −10.9971 |
| 4649 | −2.0207 | −0.7528 |
| 4650 | −9.0291 | −8.5358 |
| 4651 | −3.6645 | −2.5888 |
| 4652 | −2.9125 | −2.2111 |
| 4653 | −5.4147 | −3.6583 |
| 4654 | −5.9467 | −4.5798 |
| 4655 | −5.4437 | −3.8747 |
| 4656 | −3.1928 | −2.1734 |
| 4657 | −4.8176 | −3.4793 |
| 4658 | −9.0656 | −6.8942 |
| 4659 | −4.1729 | −2.8270 |
| 4660 | −4.6152 | −2.9950 |
| 4661 | −7.0611 | −5.7966 |
| 4662 | −6.6003 | −4.8189 |
| 4663 | −7.8195 | −4.8180 |
| 4664 | −6.6203 | −5.9964 |
| 4665 | −7.0256 | −5.3181 |

TABLE 8
Transposon Right end Variants SEQ ID NOs: 845-2690

| | Normalized | Normalized |
|---|---|---|
| | enrichment = | enrichment = |
| | Log2 (Normalized | Log2 (Normalized |
| SEQ ID | FC) - RL (1^{st} | FC) - RL (2nd |
| NO | Replicate) | Replicate) |
| 845 | −0.0972 | −0.0917 |
| 846 | 0.1133 | 0.0709 |
| 847 | 0.1499 | 0.2162 |
| 848 | −0.1129 | −0.0245 |
| 849 | −0.2200 | −0.0967 |
| 850 | −0.0175 | 0.0266 |
| 851 | −0.0715 | −0.0576 |
| 852 | −0.5016 | −0.2900 |
| 853 | 0.0165 | 0.0605 |
| 854 | −0.0212 | 0.0131 |
| 855 | −0.1773 | −0.0457 |
| 856 | −0.0125 | −0.0060 |
| 857 | 0.0242 | 0.0000 |
| 858 | 0.1188 | 0.1580 |
| 859 | 0.1927 | 0.0611 |
| 860 | 0.0026 | 0.0011 |
| 861 | −0.2103 | −0.0695 |
| 862 | −0.0484 | 0.0157 |
| 863 | −0.2294 | −0.0776 |
| 864 | −0.1197 | −0.0652 |
| 865 | 0.1329 | 0.0411 |
| 866 | 0.0305 | 0.0139 |
| 867 | 0.0908 | 0.1321 |
| 868 | −0.0285 | −0.0594 |
| 869 | −0.0538 | −0.1167 |
| 870 | −0.0690 | −0.0491 |
| 871 | −0.0171 | −0.0639 |
| 872 | −0.0248 | 0.0467 |
| 873 | −0.2783 | −0.0966 |
| 874 | −0.3390 | −0.3395 |
| 875 | −0.1778 | −0.1568 |
| 876 | −0.3871 | −0.3062 |
| 877 | −0.0506 | 0.0656 |
| 878 | −0.2168 | −0.1973 |
| 879 | −0.4239 | −0.2132 |
| 880 | −0.4862 | −0.2364 |
| 881 | −0.3112 | 0.0123 |
| 882 | −0.2186 | −0.2249 |
| 883 | −0.1887 | −0.1332 |
| 884 | −0.1433 | −0.1747 |
| 885 | 0.0795 | 0.0436 |
| 886 | −0.0144 | 0.0158 |
| 887 | −0.1188 | −0.0667 |
| 888 | 0.1965 | 0.1410 |
| 889 | −0.0110 | −0.0979 |
| 890 | 0.1291 | 0.0906 |
| 891 | 0.1271 | 0.1828 |
| 892 | −0.6427 | −0.4707 |
| 893 | −0.7523 | −0.5963 |
| 894 | −0.0641 | −0.0799 |
| 895 | −0.5287 | −0.6630 |
| 896 | 0.0538 | 0.1945 |
| 897 | −0.0415 | −0.0249 |
| 898 | −0.5239 | −0.3676 |
| 899 | −0.7044 | −0.5808 |
| 900 | −0.5191 | −0.3504 |
| 901 | −0.1370 | 0.0589 |
| 902 | −0.7140 | −0.7370 |
| 903 | −0.1906 | −0.2914 |
| 904 | −0.1037 | −0.0799 |
| 905 | 0.1294 | 0.1549 |
| 906 | −0.4808 | −0.4430 |
| 907 | −0.2015 | −0.1620 |
| 908 | 0.0207 | 0.0031 |
| 909 | −0.0069 | 0.1029 |
| 910 | −0.0639 | −0.0663 |
| 911 | −0.1108 | −0.1709 |
| 912 | −0.3188 | −0.2430 |
| 913 | −0.2313 | −0.2410 |
| 914 | −0.5408 | −0.3811 |
| 915 | −0.1487 | −0.0595 |
| 916 | −0.2023 | −0.2057 |
| 917 | 0.0030 | −0.1030 |
| 918 | −0.4366 | −0.3627 |
| 919 | −0.3066 | −0.1887 |
| 920 | −0.1731 | 0.1401 |
| 921 | −0.8055 | −0.7116 |
| 922 | −0.4143 | −0.1711 |
| 923 | −0.2934 | 0.0030 |
| 924 | −0.4469 | −0.2285 |
| 925 | 0.0162 | 0.1070 |
| 926 | −0.0903 | −0.1001 |
| 927 | −0.3575 | −0.3030 |
| 928 | −0.5593 | −0.2101 |
| 929 | −0.5401 | −0.2754 |
| 930 | −0.2162 | −0.0815 |
| 931 | −0.6106 | −0.4018 |
| 932 | −0.4470 | −0.2328 |
| 933 | −0.5047 | −0.4051 |
| 934 | −0.5751 | −0.4384 |
| 935 | −0.1005 | 0.1509 |
| 936 | −0.6109 | −0.2998 |
| 937 | −0.1516 | 0.0573 |
| 938 | −0.3121 | −0.3291 |
| 939 | −0.5857 | −0.3550 |
| 940 | −0.5489 | −0.4308 |
| 941 | −0.6264 | −0.4099 |
| 942 | 0.0565 | 0.3352 |
| 943 | −0.1753 | −0.0650 |
| 944 | −0.4000 | −0.4042 |
| 945 | −0.7127 | −0.4350 |
| 946 | 0.0251 | −0.2093 |
| 947 | −0.4439 | −0.3738 |
| 948 | −0.4076 | −0.3305 |
| 949 | −0.4771 | −0.3682 |
| 950 | −0.9827 | −0.8885 |
| 951 | −0.2673 | −0.3466 |
| 952 | −0.4213 | −0.5371 |
| 953 | −0.1103 | 0.0186 |
| 954 | 0.0836 | 0.0535 |
| 955 | 0.0757 | −0.0860 |
| 956 | −0.1355 | −0.0196 |
| 957 | −0.1310 | −0.1235 |
| 958 | 0.0618 | −0.1443 |
| 959 | −0.1458 | −0.1082 |
| 960 | 0.0306 | 0.0718 |
| 961 | −0.8817 | −0.7317 |
| 962 | −0.9083 | −0.9826 |
| 963 | −0.0536 | −0.0798 |
| 964 | 0.2161 | −0.4247 |
| 965 | −0.7814 | −0.8480 |
| 966 | 0.0470 | −0.1558 |
| 967 | −0.8321 | −0.9597 |
| 968 | −0.6211 | −0.5975 |
| 969 | −0.1929 | −0.2793 |
| 970 | −0.0364 | −0.1358 |
| 971 | −1.2181 | −1.2482 |
| 972 | −0.1452 | −0.0881 |
| 973 | 0.3667 | 0.3038 |
| 974 | 0.1401 | −0.0801 |
| 975 | −0.4893 | −0.5730 |
| 976 | −0.2694 | −0.1883 |
| 977 | −0.2019 | −0.0446 |
| 978 | 0.4096 | 0.4099 |
| 979 | −0.2269 | −0.1175 |
| 980 | −0.4636 | −0.4742 |
| 981 | −0.2837 | −0.2560 |
| 982 | −0.6064 | −0.5119 |
| 983 | −0.0641 | −0.0852 |
| 984 | −0.0505 | −0.0569 |
| 985 | −1.4198 | −1.2264 |
| 986 | −0.8098 | −0.6498 |
| 987 | −0.2677 | −0.2607 |
| 988 | 0.0986 | 0.1762 |
| 989 | −0.0479 | 0.0529 |
| 990 | 0.8539 | 1.0127 |
| 991 | −1.3086 | −1.2200 |
| 992 | −0.5181 | −0.3570 |
| 993 | −0.5095 | −0.3630 |
| 994 | −0.6538 | −0.4741 |
| 995 | −0.0613 | −0.0722 |
| 996 | −0.5768 | −0.3511 |
| 997 | −0.8888 | −0.7021 |
| 998 | −0.7110 | −0.5351 |
| 999 | −0.3799 | −0.3643 |
| 1000 | −0.2306 | −0.1073 |
| 1001 | −0.8315 | −0.7541 |
| 1002 | −0.3623 | −0.0686 |
| 1003 | −0.4499 | −0.5013 |
| 1004 | −0.3464 | −0.2103 |
| 1005 | −1.0335 | −0.7974 |
| 1006 | −0.5741 | −0.4152 |
| 1007 | −0.8813 | −0.6250 |
| 1008 | −0.6577 | −0.4492 |
| 1009 | −0.5500 | −0.3941 |
| 1010 | −1.9146 | −1.5090 |
| 1011 | −0.5733 | −0.4754 |
| 1012 | −0.2210 | −0.2784 |
| 1013 | −0.1405 | −0.1524 |
| 1014 | −0.1962 | −0.0545 |
| 1015 | 0.2993 | 0.2331 |
| 1016 | 0.1498 | 0.3270 |
| 1017 | 1.3602 | 1.4722 |
| 1018 | 0.0515 | −0.1304 |
| 1019 | 0.3793 | 0.3130 |
| 1020 | −0.2447 | −0.1861 |
| 1021 | −0.7838 | −0.7585 |
| 1022 | −0.9265 | −0.8223 |
| 1023 | 0.1286 | −0.0335 |
| 1024 | −0.4673 | −0.6612 |
| 1025 | −0.2544 | −0.3110 |
| 1026 | −0.2247 | −0.3731 |
| 1027 | −1.3635 | −1.3215 |
| 1028 | −0.5855 | −0.3110 |
| 1029 | −0.5955 | −0.5531 |
| 1030 | −0.0980 | −0.2128 |
| 1031 | −1.2607 | −1.0972 |
| 1032 | −0.0756 | −0.2187 |
| 1033 | 0.2025 | 0.0598 |
| 1034 | −0.1733 | −0.2244 |
| 1035 | −0.0949 | −0.1540 |
| 1036 | 0.0484 | −0.0482 |
| 1037 | −0.0613 | −0.0422 |
| 1038 | −0.6332 | −0.5313 |
| 1039 | −0.0677 | −0.1704 |
| 1040 | −0.0583 | −0.0652 |
| 1041 | −0.2022 | −0.2329 |
| 1042 | −0.3770 | −0.3858 |
| 1043 | 0.1607 | 0.4341 |
| 1044 | −0.1388 | −0.1000 |
| 1045 | −0.0984 | 0.0814 |
| 1046 | −0.5026 | −0.4517 |
| 1047 | 0.1214 | 0.1101 |
| 1048 | 0.2508 | 0.1662 |
| 1049 | −0.1773 | −0.2940 |
| 1050 | −0.1284 | −0.0849 |
| 1051 | −0.1162 | −0.1769 |
| 1052 | −0.2483 | −0.2220 |
| 1053 | 0.2150 | 0.1375 |
| 1054 | −0.0343 | −0.0760 |
| 1055 | 0.3564 | 0.3269 |
| 1056 | 0.1272 | 0.1034 |
| 1057 | −0.7125 | −0.7111 |
| 1058 | −0.4534 | −0.3559 |
| 1059 | −0.1197 | 0.0009 |
| 1060 | 0.1311 | 0.0775 |
| 1061 | 0.2255 | 0.2426 |
| 1062 | −0.9085 | −0.7188 |
| 1063 | −6.4750 | −5.3052 |
| 1064 | −1.0147 | −0.6019 |
| 1065 | −0.1005 | −0.0524 |
| 1066 | −2.4832 | −1.9162 |
| 1067 | −0.6184 | −0.4395 |
| 1068 | −6.1709 | −5.4441 |
| 1069 | −6.6114 | −6.7160 |
| 1070 | −1.9540 | −1.6726 |
| 1071 | 0.0191 | 0.1691 |
| 1072 | −0.2429 | −0.2170 |
| 1073 | −0.2817 | −0.1854 |
| 1074 | −0.1426 | −0.1629 |
| 1075 | −0.1736 | −0.1749 |
| 1076 | −0.0508 | −0.0561 |
| 1077 | −0.1196 | −0.1088 |
| 1078 | −0.0218 | 0.0241 |
| 1079 | −0.0763 | −0.1423 |
| 1080 | −0.0041 | 0.0526 |
| 1081 | −0.0071 | −0.0316 |
| 1082 | 0.0937 | 0.0666 |
| 1083 | −0.0049 | −0.0924 |
| 1084 | −0.1870 | −0.0910 |
| 1085 | −0.1287 | −0.1056 |
| 1086 | −0.0072 | 0.1001 |
| 1087 | 0.3397 | 0.3328 |
| 1088 | 0.1505 | 0.1116 |
| 1089 | 0.0103 | −0.0031 |
| 1090 | 0.0763 | 0.1241 |
| 1091 | −0.2111 | −0.1293 |
| 1092 | 0.0470 | 0.0065 |
| 1093 | −0.2505 | −0.1845 |
| 1094 | −0.2878 | −0.2396 |
| 1095 | −0.5054 | −0.4204 |
| 1096 | −0.6403 | −0.4591 |
| 1097 | −0.0201 | 0.0192 |
| 1098 | −0.2590 | −0.2499 |
| 1099 | −0.0900 | −0.0843 |
| 1100 | 1.2979 | 1.4027 |
| 1101 | −0.7546 | −0.5592 |
| 1102 | −0.5416 | −0.4750 |
| 1103 | −0.7140 | −0.4936 |
| 1104 | −0.5335 | −0.4716 |
| 1105 | −1.2368 | −0.9783 |
| 1106 | −0.1365 | −0.0905 |
| 1107 | 0.5732 | 0.7451 |
| 1108 | −0.8582 | −0.6030 |
| 1109 | −0.4895 | −0.2336 |
| 1110 | −0.8601 | −0.5282 |
| 1111 | −0.3335 | −0.0574 |
| 1112 | −0.5970 | −0.5052 |
| 1113 | −0.5596 | −0.4172 |
| 1114 | −0.7238 | −0.6062 |
| 1115 | −0.6959 | −0.7126 |
| 1116 | −1.1843 | −0.7625 |
| 1117 | −0.5295 | −0.5207 |
| 1118 | −0.3534 | −0.3543 |
| 1119 | −1.0659 | −0.8250 |
| 1120 | −0.5712 | −0.5344 |
| 1121 | −0.4024 | −0.4923 |
| 1122 | 0.5495 | 0.4422 |
| 1123 | −0.7704 | −0.6445 |
| 1124 | −1.2678 | −1.1422 |
| 1125 | −2.2415 | −2.1220 |
| 1126 | −3.2710 | −3.0021 |
| 1127 | −1.8651 | −1.6938 |
| 1128 | −1.1325 | −0.8602 |
| 1129 | −0.0103 | −0.0302 |
| 1130 | 0.1811 | −0.0566 |
| 1131 | −0.8755 | −0.7693 |
| 1132 | 0.1435 | 0.0482 |
| 1133 | −0.6978 | −0.5524 |
| 1134 | −0.9802 | −0.9319 |
| 1135 | −0.8680 | −0.7714 |
| 1136 | −1.1320 | −0.9297 |
| 1137 | −0.3590 | −0.4287 |
| 1138 | −1.1004 | −0.7888 |
| 1139 | −1.9804 | −1.7244 |
| 1140 | −1.0642 | −0.8442 |
| 1141 | −0.6490 | −0.6346 |
| 1142 | −0.3133 | −0.3279 |
| 1143 | −1.3951 | −1.2839 |
| 1144 | −1.4158 | −1.2992 |
| 1145 | −2.8650 | −2.5688 |
| 1146 | −3.8628 | −3.7285 |
| 1147 | −1.9540 | −1.7465 |
| 1148 | −0.4532 | −0.2019 |
| 1149 | −0.5588 | −0.5654 |
| 1150 | −0.8854 | −0.7707 |
| 1151 | −0.3970 | −0.4226 |
| 1152 | −0.1217 | −0.1515 |
| 1153 | −0.2943 | −0.2989 |
| 1154 | −0.4198 | −0.4741 |
| 1155 | −1.1598 | −0.9642 |
| 1156 | −0.1363 | 0.1526 |
| 1157 | −6.3693 | −6.4833 |
| 1158 | −6.7049 | −6.3689 |
| 1159 | −6.1630 | −6.5027 |
| 1160 | −6.2235 | −6.6506 |
| 1161 | −0.2925 | −0.2750 |
| 1162 | −0.0191 | 0.0153 |
| 1163 | −0.2720 | −0.1613 |
| 1164 | −0.1078 | −0.1073 |
| 1165 | −0.1771 | −0.1057 |
| 1166 | 0.0599 | 0.0633 |
| 1167 | −0.4888 | −0.2902 |
| 1168 | −0.0771 | −0.0866 |
| 1169 | −0.0023 | −0.0596 |
| 1170 | −0.0355 | −0.0004 |
| 1171 | −0.3142 | −0.1313 |
| 1172 | −0.2688 | −0.2331 |
| 1173 | −0.1434 | −0.1321 |
| 1174 | −0.2966 | −0.0615 |
| 1175 | −0.1991 | −0.0429 |
| 1176 | −0.5519 | −0.4188 |
| 1177 | −0.8182 | −0.4566 |
| 1178 | −0.0872 | −0.0421 |
| 1179 | −0.0327 | −0.1015 |
| 1180 | −0.0860 | −0.1599 |
| 1181 | 0.0660 | −0.0014 |
| 1182 | −0.1228 | −0.1465 |
| 1183 | −0.6048 | −0.3343 |
| 1184 | −0.6977 | −0.5532 |
| 1185 | −0.1949 | −0.2821 |
| 1186 | −0.0167 | −0.1439 |
| 1187 | −0.1985 | −0.2580 |
| 1188 | −0.4633 | −0.4195 |
| 1189 | −0.4746 | −0.3123 |
| 1190 | −0.8289 | −0.6101 |
| 1191 | −0.4667 | −0.1463 |
| 1192 | −0.2454 | 0.1051 |
| 1193 | −0.4368 | −0.1116 |
| 1194 | −0.4125 | −0.2973 |
| 1195 | −0.4247 | −0.2010 |
| 1196 | −0.8292 | −0.4289 |
| 1197 | −1.2878 | −0.9080 |
| 1198 | −0.6738 | −0.5303 |
| 1199 | −1.5567 | −1.3018 |
| 1200 | −0.8928 | −0.6332 |
| 1201 | −0.1547 | −0.1702 |
| 1202 | −0.3243 | −0.2689 |
| 1203 | −0.1981 | −0.1769 |
| 1204 | −0.3098 | −0.3504 |
| 1205 | −0.2624 | −0.2906 |
| 1206 | −0.7014 | −0.7713 |
| 1207 | −0.6682 | −0.5498 |
| 1208 | −0.1719 | −0.3577 |
| 1209 | −0.0287 | 0.0170 |
| 1210 | −0.2438 | 0.0253 |
| 1211 | −0.9559 | −0.8861 |
| 1212 | −0.8260 | −0.5582 |
| 1213 | −0.1419 | −0.2345 |
| 1214 | −0.4096 | −0.2837 |
| 1215 | −0.1997 | −0.0628 |
| 1216 | −0.5405 | −0.4261 |
| 1217 | −0.8223 | −0.7210 |
| 1218 | −0.7911 | −0.6729 |
| 1219 | −1.9800 | −1.9652 |
| 1220 | −1.6845 | −1.2165 |
| 1221 | −0.6741 | −0.6091 |
| 1222 | −0.3867 | −0.2421 |
| 1223 | −0.2994 | −0.2956 |
| 1224 | −0.2320 | −0.1583 |
| 1225 | −0.3325 | −0.4582 |
| 1226 | −0.6108 | −0.6203 |
| 1227 | −0.9205 | −0.9350 |
| 1228 | −0.1911 | −0.2540 |
| 1229 | −0.3531 | −0.2884 |
| 1230 | −0.6742 | −0.6006 |
| 1231 | −0.4128 | −0.3220 |
| 1232 | −0.1489 | −0.1944 |
| 1233 | 0.4748 | 0.2843 |
| 1234 | −0.2267 | −0.1731 |
| 1235 | −0.9208 | −0.7290 |
| 1236 | −0.3935 | −0.2296 |
| 1237 | −0.1188 | −0.1454 |
| 1238 | −5.4023 | −4.2914 |
| 1239 | −6.2608 | −6.6389 |
| 1240 | −6.6528 | −6.5892 |
| 1241 | 0.1282 | 0.3011 |
| 1242 | 0.1017 | 0.2009 |
| 1243 | −0.0179 | 0.0286 |
| 1244 | −0.0006 | 0.0162 |
| 1245 | −0.1826 | −0.0935 |
| 1246 | 0.0299 | 0.1719 |
| 1247 | −0.2954 | −0.2584 |
| 1248 | −0.0437 | −0.0372 |
| 1249 | −0.1558 | −0.0856 |
| 1250 | −6.2442 | −7.0622 |
| 1251 | −6.2726 | −6.9032 |
| 1252 | −5.1789 | −6.2329 |
| 1253 | −5.8702 | −5.9493 |
| 1254 | −6.2998 | −6.1229 |
| 1255 | −5.6230 | −4.5139 |
| 1256 | −1.6586 | −1.2090 |
| 1257 | −1.6549 | −1.4101 |
| 1258 | −0.7977 | −0.7664 |
| 1259 | −0.8858 | −0.7854 |
| 1260 | −1.4355 | −1.1652 |
| 1261 | −1.1663 | −0.9791 |
| 1262 | −1.1320 | −0.8006 |
| 1263 | −1.6870 | −1.5627 |
| 1264 | −2.3376 | −2.1798 |
| 1265 | −2.0035 | −1.8135 |
| 1266 | −0.9422 | −0.8684 |
| 1267 | −0.2612 | −0.3539 |
| 1268 | −0.6164 | −0.6386 |
| 1269 | −0.6856 | −0.4844 |
| 1270 | −2.4235 | −2.2130 |
| 1271 | −2.3696 | −2.1270 |
| 1272 | −1.2745 | −1.1873 |
| 1273 | −1.7032 | −1.4048 |
| 1274 | −0.9630 | −0.9131 |
| 1275 | −0.8272 | −0.5738 |
| 1276 | −0.3831 | −0.3797 |
| 1277 | −0.6403 | −0.5088 |
| 1278 | −0.5832 | −0.3960 |
| 1279 | −1.4093 | −1.1704 |
| 1280 | −1.8790 | −1.5266 |
| 1281 | −2.0245 | −1.7991 |
| 1282 | −0.4959 | −0.4118 |
| 1283 | −1.5819 | −1.4164 |
| 1284 | −1.7800 | −1.9283 |
| 1285 | −1.8205 | −1.6594 |
| 1286 | −0.7893 | −0.6376 |
| 1287 | −0.6421 | −0.4161 |
| 1288 | 2.2631 | 3.3117 |
| 1289 | −0.6097 | −0.6117 |
| 1290 | −2.1778 | −2.0476 |
| 1291 | −0.7624 | −0.5950 |
| 1292 | −1.7240 | −1.4001 |
| 1293 | −2.0112 | −1.9930 |
| 1294 | −0.9688 | −0.8796 |
| 1295 | −1.6290 | −1.6665 |
| 1296 | −0.8800 | −0.7230 |
| 1297 | −0.3333 | −0.1335 |
| 1298 | −0.4204 | −0.3192 |
| 1299 | −0.4270 | −0.2141 |
| 1300 | −0.4963 | −0.3980 |
| 1301 | −0.5979 | −0.3694 |
| 1302 | −0.8924 | −0.5570 |
| 1303 | −0.7206 | −0.3899 |
| 1304 | −0.4632 | −0.2903 |
| 1305 | −0.4186 | −0.3804 |
| 1306 | −0.5212 | −0.3291 |
| 1307 | −0.3875 | −0.3266 |
| 1308 | −0.7989 | −0.4965 |
| 1309 | −0.3785 | −0.2717 |
| 1310 | −0.3116 | −0.1766 |
| 1311 | −0.0443 | −0.1059 |
| 1312 | −0.5944 | −0.4761 |
| 1313 | −1.0815 | −0.8558 |
| 1314 | −0.4181 | −0.3187 |
| 1315 | −0.5631 | −0.1885 |
| 1316 | −0.7481 | −0.4902 |
| 1317 | −0.3174 | −0.1767 |
| 1318 | −0.6081 | −0.5006 |
| 1319 | −0.2492 | −0.0642 |
| 1320 | −0.1930 | −0.2224 |
| 1321 | 0.2232 | 0.2194 |
| 1322 | −0.0202 | −0.0266 |
| 1323 | −0.1394 | −0.0830 |
| 1324 | −0.3632 | −0.2088 |
| 1325 | −0.3346 | −0.2052 |
| 1326 | −0.1587 | −0.1470 |
| 1327 | −6.4665 | −7.1605 |
| 1328 | −7.1385 | −7.3766 |
| 1329 | −6.7434 | −6.9995 |
| 1330 | −5.4555 | −5.7622 |
| 1331 | −5.9898 | −5.9362 |
| 1332 | −6.4308 | −7.9428 |
| 1333 | −0.8973 | −0.9353 |
| 1334 | −1.9011 | −1.5292 |
| 1335 | −0.9008 | −0.7775 |
| 1336 | −0.5444 | −0.5008 |
| 1337 | −0.8960 | −0.7826 |
| 1338 | −0.8754 | −0.7413 |
| 1339 | −2.7074 | −2.4673 |
| 1340 | −3.2654 | −2.9906 |
| 1341 | −3.8603 | −4.0416 |
| 1342 | −4.3731 | −4.3634 |
| 1343 | −4.4177 | −4.1405 |
| 1344 | −4.2119 | −4.1793 |
| 1345 | −2.0898 | −2.1689 |
| 1346 | −3.9532 | −3.5811 |
| 1347 | −1.5566 | −1.2616 |
| 1348 | −2.7740 | −2.6573 |
| 1349 | −2.8774 | −2.5098 |
| 1350 | −3.1250 | −2.7771 |
| 1351 | −1.4608 | −1.3436 |
| 1352 | −0.5113 | −0.2069 |
| 1353 | −1.3287 | −1.1224 |
| 1354 | −0.7777 | −0.7775 |
| 1355 | −0.5907 | −0.5901 |
| 1356 | −1.4064 | −1.0720 |
| 1357 | −0.2079 | −0.2277 |
| 1358 | −0.4067 | −0.3810 |
| 1359 | −0.8437 | −0.7015 |
| 1360 | −2.1790 | −2.3925 |
| 1361 | −3.3607 | −3.6427 |
| 1362 | −3.0680 | −3.0051 |
| 1363 | −3.6556 | −3.3395 |
| 1364 | −2.0201 | −1.9637 |
| 1365 | −1.8558 | −1.6892 |
| 1366 | −2.2051 | −2.2177 |
| 1367 | −1.0293 | −0.9951 |
| 1368 | −1.8634 | −1.6804 |
| 1369 | −1.8889 | −1.7740 |
| 1370 | −2.0082 | −1.8146 |
| 1371 | −1.5300 | −1.2530 |
| 1372 | −1.0915 | −0.9600 |
| 1373 | −1.0420 | −0.8164 |
| 1374 | −0.6743 | −0.5696 |
| 1375 | −0.4950 | −0.3779 |
| 1376 | −0.3242 | −0.2599 |
| 1377 | −0.6377 | −0.4441 |
| 1378 | −0.6059 | −0.3460 |
| 1379 | −1.2272 | −0.9050 |
| 1380 | −0.5863 | −0.4034 |
| 1381 | −1.0569 | −0.7652 |
| 1382 | −0.2362 | 0.0128 |
| 1383 | −0.6351 | −0.4266 |
| 1384 | −1.0605 | −0.8107 |
| 1385 | −0.7557 | −0.5987 |
| 1386 | −1.0498 | −0.6704 |
| 1387 | −0.5410 | −0.3941 |
| 1388 | −0.7122 | −0.5841 |
| 1389 | −0.5807 | −0.5413 |
| 1390 | −0.6753 | −0.4423 |
| 1391 | −0.6652 | −0.6053 |
| 1392 | −0.7209 | −0.6220 |
| 1393 | −0.7501 | −0.6532 |
| 1394 | −0.7056 | −0.5295 |
| 1395 | −0.1582 | −0.1418 |
| 1396 | −0.2646 | −0.2887 |
| 1397 | −0.2260 | −0.2113 |
| 1398 | −0.2210 | −0.0953 |
| 1399 | 0.0013 | −0.0024 |
| 1400 | 0.3407 | 0.3379 |
| 1401 | −0.0032 | 0.0436 |
| 1402 | −15.0000 | −8.8948 |
| 1403 | −7.4280 | −7.4546 |
| 1404 | −8.2717 | −9.8832 |
| 1405 | −0.7771 | −0.1201 |
| 1406 | −4.9847 | −4.9695 |
| 1407 | −15.0000 | −15.0000 |
| 1408 | −7.4951 | −8.8436 |
| 1409 | −8.1122 | −10.7237 |
| 1410 | −6.2941 | −5.9987 |
| 1411 | −0.3884 | −0.2739 |
| 1412 | 0.2663 | 0.2334 |
| 1413 | −2.7730 | −2.5333 |
| 1414 | −3.4387 | −3.5539 |
| 1415 | −0.5907 | −0.2066 |
| 1416 | −1.7891 | −1.4545 |
| 1417 | 0.1146 | −0.0182 |
| 1418 | −0.4913 | −0.0943 |
| 1419 | −9.0703 | −7.1900 |
| 1420 | −6.4981 | −7.1877 |
| 1421 | −6.8547 | −7.4662 |
| 1422 | −5.7807 | −7.4771 |
| 1423 | −6.7507 | −7.1923 |
| 1424 | −7.1338 | −6.8385 |
| 1425 | −5.8752 | −5.7443 |
| 1426 | −6.4936 | −7.2401 |
| 1427 | −7.0052 | −7.2123 |
| 1428 | −5.9967 | −5.8751 |
| 1429 | −6.6941 | −6.5507 |
| 1430 | −6.5594 | −6.6304 |
| 1431 | −6.3757 | −6.5828 |
| 1432 | −6.8453 | −6.2870 |
| 1433 | −6.3822 | −6.7498 |
| 1434 | −5.7589 | −5.5001 |
| 1435 | −6.1881 | −5.9293 |
| 1436 | −3.0811 | −3.1780 |
| 1437 | −3.0895 | −2.8425 |
| 1438 | −3.3071 | −3.2159 |
| 1439 | −1.2011 | −0.9876 |
| 1440 | −1.1118 | −0.9891 |
| 1441 | −3.6448 | −3.5323 |
| 1442 | −0.9287 | −0.8481 |
| 1443 | −3.4847 | −3.4804 |
| 1444 | −1.2100 | −0.6500 |
| 1445 | −2.0982 | −1.7234 |
| 1446 | 0.0221 | 0.2485 |
| 1447 | −0.3289 | 0.0972 |
| 1448 | −0.8643 | −0.3434 |
| 1449 | −0.0196 | 0.3471 |
| 1450 | 0.0714 | 0.5092 |
| 1451 | 0.1894 | 0.6446 |
| 1452 | −0.5919 | −0.1541 |
| 1453 | −0.3533 | 0.0156 |
| 1454 | −0.4238 | −0.0323 |
| 1455 | −0.0870 | 0.2232 |
| 1456 | −0.1576 | 0.1996 |
| 1457 | −0.4935 | 0.0316 |
| 1458 | −0.1038 | 0.2150 |
| 1459 | 0.6302 | 0.9431 |
| 1460 | 0.0495 | 0.2278 |
| 1461 | 0.0120 | 0.2304 |
| 1462 | 0.0921 | 0.2967 |
| 1463 | 0.5990 | 0.8271 |
| 1464 | −0.3096 | −0.2101 |
| 1465 | 0.0296 | 0.2530 |
| 1466 | −0.4406 | −0.3171 |
| 1467 | −0.3182 | −0.1457 |
| 1468 | −0.1583 | −0.0457 |
| 1469 | −0.3955 | −0.1701 |
| 1470 | −0.3171 | 0.1276 |
| 1471 | −0.4759 | −0.3844 |
| 1472 | −0.1222 | −0.0686 |
| 1473 | −0.1232 | 0.0349 |
| 1474 | −4.3036 | −5.0869 |
| 1475 | −2.8035 | −3.1780 |
| 1476 | −3.1850 | −3.0775 |
| 1477 | −1.1415 | −0.7737 |
| 1478 | −0.8517 | −0.4744 |
| 1479 | −2.2767 | −1.9738 |
| 1480 | −1.0685 | −0.5542 |
| 1481 | −1.4460 | −1.0334 |
| 1482 | −0.6205 | −0.3478 |
| 1483 | −0.6330 | −0.2327 |
| 1484 | −0.4403 | −0.0702 |
| 1485 | −1.5754 | −1.0219 |
| 1486 | −0.4861 | −0.2156 |
| 1487 | −0.5874 | −0.1697 |
| 1488 | −0.0805 | 0.1963 |
| 1489 | −0.3504 | −0.0641 |
| 1490 | 0.0258 | 0.2504 |
| 1491 | −0.3106 | −0.0365 |
| 1492 | 1.1926 | 1.4901 |
| 1493 | −0.1134 | 0.1560 |
| 1494 | −0.1202 | −0.0123 |
| 1495 | 0.3423 | 0.7625 |
| 1496 | −0.2646 | 0.0320 |
| 1497 | −0.2071 | −0.0776 |
| 1498 | −0.9520 | −0.3652 |
| 1499 | −0.2542 | 0.0033 |
| 1500 | 0.5712 | 0.8422 |
| 1501 | −0.5000 | −0.0896 |
| 1502 | 0.1312 | 0.3586 |
| 1503 | −0.4072 | 0.1070 |
| 1504 | −0.1311 | 0.1476 |
| 1505 | −0.1298 | 0.1228 |
| 1506 | −0.5973 | −0.3471 |
| 1507 | 0.2570 | 0.4720 |
| 1508 | −0.8475 | −0.5664 |
| 1509 | −1.5604 | −1.2550 |
| 1510 | −0.7856 | −0.6668 |
| 1511 | −4.7581 | −4.6055 |
| 1512 | −5.0827 | −5.0772 |
| 1513 | −1.9160 | −1.5486 |
| 1514 | −3.1906 | −2.7051 |
| 1515 | −0.3309 | −0.3317 |
| 1516 | 0.4344 | 0.3008 |
| 1517 | −1.1501 | −1.0586 |
| 1518 | −1.4402 | −1.0133 |
| 1519 | −1.6438 | −1.4626 |
| 1520 | −1.1336 | −0.9546 |
| 1521 | −1.2119 | −1.2170 |
| 1522 | −1.0062 | −0.9686 |
| 1523 | −0.3704 | −0.3289 |
| 1524 | −0.2841 | −0.1923 |
| 1525 | −0.6341 | −0.4925 |
| 1526 | −0.9848 | −0.7491 |
| 1527 | −1.6261 | −1.2224 |
| 1528 | −1.7354 | −1.3407 |
| 1529 | −3.0235 | −2.4425 |
| 1530 | −4.2933 | −4.1750 |
| 1531 | −4.9938 | −5.3320 |
| 1532 | −3.3184 | −3.0897 |
| 1533 | −0.5272 | −0.4993 |
| 1534 | −4.3766 | −4.0946 |
| 1535 | −6.0703 | −5.9071 |
| 1536 | −6.5033 | −6.9043 |
| 1537 | −7.0385 | −6.3732 |
| 1538 | −8.9694 | −7.1029 |
| 1539 | −1.7789 | −1.5003 |
| 1540 | −0.8205 | −0.7889 |
| 1541 | −0.9020 | −0.8005 |
| 1542 | −0.3904 | −0.3920 |
| 1543 | −0.0454 | −0.2096 |
| 1544 | −1.4908 | −1.1834 |
| 1545 | −0.7450 | −0.5924 |
| 1546 | −0.5293 | −0.5001 |
| 1547 | 0.1606 | 0.0061 |
| 1548 | −0.2372 | −0.2860 |
| 1549 | −0.2588 | 0.0197 |
| 1550 | −1.4255 | −1.1720 |
| 1551 | −5.3244 | −4.5145 |
| 1552 | −2.5337 | −2.1278 |
| 1553 | −1.3184 | −0.9478 |
| 1554 | −1.0100 | −0.8103 |
| 1555 | −0.3928 | −0.1208 |
| 1556 | −0.5473 | −0.3392 |
| 1557 | −0.4941 | −0.2841 |
| 1558 | −0.4247 | −0.2461 |
| 1559 | −0.4666 | −0.4763 |
| 1560 | −1.1110 | −0.9875 |
| 1561 | −1.1179 | −0.9110 |
| 1562 | −1.2551 | −0.9968 |
| 1563 | −2.4427 | −2.2461 |
| 1564 | −4.3354 | −4.1376 |
| 1565 | −0.5779 | −0.5747 |
| 1566 | −0.7596 | −0.5430 |
| 1567 | −0.8413 | −0.6010 |
| 1568 | −1.7788 | −1.4492 |
| 1569 | −2.4874 | −2.0469 |
| 1570 | −2.0435 | −1.7373 |
| 1571 | −6.7224 | −7.3339 |
| 1572 | −6.9795 | −6.5421 |
| 1573 | −7.2145 | −7.3785 |
| 1574 | −6.4574 | −7.7377 |
| 1575 | −7.1751 | −7.0090 |
| 1576 | −8.7860 | −7.7251 |
| 1577 | 0.0868 | −0.1387 |
| 1578 | −6.5239 | −6.5505 |
| 1579 | −2.2915 | −1.9710 |
| 1580 | −6.4079 | −6.2645 |
| 1581 | −7.1110 | −6.5781 |
| 1582 | −6.5821 | −6.7893 |
| 1583 | −7.3396 | −6.7381 |
| 1584 | −0.0346 | −0.1164 |
| 1585 | −0.6484 | −0.4964 |
| 1586 | −1.9590 | −1.8755 |
| 1587 | −3.7592 | −3.1882 |
| 1588 | −3.3737 | −2.9487 |
| 1589 | −2.8843 | −2.6501 |
| 1590 | −2.8111 | −2.5610 |
| 1591 | −2.9799 | −3.2554 |
| 1592 | −3.4575 | −3.1749 |
| 1593 | −3.9894 | −3.9629 |
| 1594 | −4.1455 | −3.4496 |
| 1595 | −2.9401 | −2.7609 |
| 1596 | −2.9819 | −3.4362 |
| 1597 | −3.5228 | −3.6763 |
| 1598 | −3.3291 | −3.0517 |
| 1599 | −3.1343 | −2.7116 |
| 1600 | −2.9580 | −3.2228 |
| 1601 | −3.4447 | −3.3088 |
| 1602 | −3.3658 | −3.2190 |
| 1603 | −3.5878 | −3.1213 |
| 1604 | −4.0870 | −4.2429 |
| 1605 | −3.3420 | −3.8731 |
| 1606 | −3.0817 | −3.4302 |
| 1607 | −3.8198 | −3.1313 |
| 1608 | −3.1066 | −3.5550 |
| 1609 | −4.7343 | −5.9535 |
| 1610 | −3.8131 | −3.4246 |
| 1611 | −3.2231 | −3.1204 |
| 1612 | −3.3658 | −2.7571 |
| 1613 | −4.3988 | −3.9848 |
| 1614 | −4.0281 | −2.9807 |
| 1615 | −3.1978 | −2.9728 |
| 1616 | −4.7016 | −3.1877 |
| 1617 | −6.5423 | −4.8684 |
| 1618 | −5.3396 | −3.8637 |
| 1619 | −0.2825 | −0.2919 |
| 1620 | −0.9262 | −0.5155 |
| 1621 | −2.1224 | −1.5337 |
| 1622 | −2.7993 | −2.4108 |
| 1623 | −2.6394 | −2.3948 |
| 1624 | −2.9905 | −2.5527 |
| 1625 | −2.1101 | −1.8062 |
| 1626 | −2.3825 | −1.9822 |
| 1627 | −3.6960 | −3.4204 |
| 1628 | −2.9079 | −2.3495 |
| 1629 | −3.2164 | −2.6039 |
| 1630 | −2.6875 | −2.3834 |
| 1631 | −0.9275 | −0.3806 |
| 1632 | −3.4579 | −2.7728 |
| 1633 | −3.0041 | −2.2636 |
| 1634 | −3.1906 | −2.9727 |
| 1635 | −2.4844 | −2.2589 |
| 1636 | −2.2874 | −1.8962 |
| 1637 | −2.3119 | −1.7450 |
| 1638 | −2.1170 | −1.5522 |
| 1639 | −2.5377 | −2.3128 |
| 1640 | −3.1255 | −3.2345 |
| 1641 | −2.4643 | −2.1194 |
| 1642 | −2.7854 | −1.7245 |
| 1643 | −2.5229 | −1.7860 |
| 1644 | −3.7617 | −5.1806 |
| 1645 | −3.4139 | −3.3932 |
| 1646 | −3.3181 | −2.9041 |
| 1647 | −3.2329 | −2.2837 |
| 1648 | −3.4540 | −2.1674 |
| 1649 | −3.4816 | −2.9463 |
| 1650 | −2.9328 | −2.3744 |
| 1651 | −3.5134 | −3.1379 |
| 1652 | −3.8653 | −3.1370 |
| 1653 | −4.1475 | −4.7046 |
| 1654 | −1.0180 | −0.6236 |
| 1655 | −0.5055 | −0.3908 |
| 1656 | −0.5311 | −0.3351 |
| 1657 | −0.3865 | −0.3128 |
| 1658 | −0.2852 | −0.2194 |
| 1659 | −0.6381 | −0.3901 |
| 1660 | −5.4944 | −5.1584 |
| 1661 | −5.1005 | −4.0275 |
| 1662 | −5.8392 | −4.8657 |
| 1663 | −4.6855 | −5.5194 |
| 1664 | −5.2630 | −3.9676 |
| 1665 | −6.2630 | −15.0000 |
| 1666 | −1.2496 | −1.2866 |
| 1667 | −4.2602 | −4.4029 |
| 1668 | −4.1285 | −3.8444 |
| 1669 | −4.6242 | −4.4528 |
| 1670 | −4.3145 | −3.8386 |
| 1671 | −0.8851 | −0.6482 |
| 1672 | −1.1907 | −0.9356 |
| 1673 | −1.5427 | −1.1059 |
| 1674 | −1.2775 | −0.8334 |
| 1675 | −1.6623 | −1.3183 |
| 1676 | 0.1396 | 0.1121 |
| 1677 | −0.0768 | −0.0984 |
| 1678 | −0.0585 | −0.0394 |
| 1679 | −0.0064 | 0.0376 |
| 1680 | −0.2236 | −0.1941 |
| 1681 | −3.5215 | −3.7279 |
| 1682 | −2.6714 | −2.7883 |
| 1683 | −4.3396 | −4.4402 |
| 1684 | −4.3866 | −4.1667 |
| 1685 | −4.9527 | −4.9523 |
| 1686 | −4.7655 | −4.2597 |
| 1687 | −3.8468 | −3.6130 |
| 1688 | −4.5620 | −4.6425 |
| 1689 | −4.6168 | −4.4387 |
| 1690 | −3.6832 | −3.5723 |
| 1691 | −3.2583 | −3.2024 |
| 1692 | −3.4480 | −2.7883 |
| 1693 | −2.7541 | −2.7806 |
| 1694 | −2.7379 | −2.4426 |
| 1695 | −0.8040 | −0.5576 |
| 1696 | −2.1977 | −1.8931 |
| 1697 | −2.2510 | −1.8655 |
| 1698 | −2.7760 | −2.1742 |
| 1699 | −3.5901 | −3.4720 |
| 1700 | −3.5304 | −3.1541 |
| 1701 | −2.9476 | −2.2792 |
| 1702 | −1.8694 | −1.5500 |
| 1703 | −0.4505 | 0.0106 |
| 1704 | −3.2837 | −2.9155 |
| 1705 | −1.9120 | −1.1677 |
| 1706 | −2.9507 | −2.9248 |
| 1707 | −2.4326 | −1.8728 |
| 1708 | −2.7768 | −1.9866 |
| 1709 | −0.9301 | −1.1666 |
| 1710 | −1.4375 | −1.3610 |
| 1711 | −1.2607 | −1.0543 |
| 1712 | −1.3637 | −1.3520 |
| 1713 | −1.6181 | −1.4154 |
| 1714 | −6.0565 | −5.6680 |
| 1715 | −3.4589 | −3.4855 |
| 1716 | 0.3802 | 0.2708 |
| 1717 | −0.1080 | 0.0978 |
| 1718 | 0.1550 | 0.2024 |
| 1719 | −0.1074 | −0.1139 |
| 1720 | −0.2674 | −0.2956 |
| 1721 | −0.4742 | −0.3674 |
| 1722 | −0.4035 | −0.4526 |
| 1723 | −0.3845 | −0.4161 |
| 1724 | −0.8176 | −0.6196 |
| 1725 | −0.6776 | −0.6652 |
| 1726 | −0.8598 | −0.7793 |
| 1727 | −0.8377 | −0.6657 |
| 1728 | −0.6022 | −0.5586 |
| 1729 | −0.7275 | −0.5694 |
| 1730 | −0.4579 | −0.2293 |
| 1731 | −0.5697 | −0.4937 |
| 1732 | −0.6096 | −0.4834 |
| 1733 | −0.7603 | −0.6312 |
| 1734 | −0.5497 | −0.3249 |
| 1735 | −0.6043 | −0.4064 |
| 1736 | −0.5104 | −0.3909 |
| 1737 | −0.8486 | −0.7422 |
| 1738 | −1.8384 | −1.1466 |
| 1739 | −0.6876 | −1.3885 |
| 1740 | 0.5184 | 0.7528 |
| 1741 | −0.5656 | −0.4049 |
| 1742 | −0.9772 | −0.7864 |
| 1743 | −0.8193 | −0.6319 |
| 1744 | −1.0203 | −0.8631 |
| 1745 | −1.1808 | −0.8542 |
| 1746 | −1.5349 | −1.2158 |
| 1747 | −2.1553 | −1.9371 |
| 1748 | −1.9378 | −1.5153 |
| 1749 | −2.4626 | −1.9388 |
| 1750 | −2.5176 | −2.1816 |
| 1751 | −2.6813 | −2.5262 |
| 1752 | −2.7281 | −2.5510 |
| 1753 | −2.0822 | −1.8569 |
| 1754 | −2.2898 | −2.3760 |
| 1755 | −2.2529 | −2.3692 |
| 1756 | −2.5857 | −2.2538 |
| 1757 | −2.2001 | −1.8941 |
| 1758 | −2.1374 | −1.7523 |
| 1759 | −2.5012 | −2.0892 |
| 1760 | −2.0021 | −1.8029 |
| 1761 | −2.1852 | −2.1243 |
| 1762 | −2.4707 | −2.0964 |
| 1763 | −2.2986 | −2.1000 |
| 1764 | −2.5959 | −2.7652 |
| 1765 | −3.5686 | −3.2621 |
| 1766 | −3.6923 | −3.8027 |
| 1767 | −3.9323 | −4.9588 |
| 1768 | −5.0990 | −5.5850 |
| 1769 | −6.2662 | −7.1229 |
| 1770 | −8.4684 | −7.0799 |
| 1771 | −6.5319 | −6.4330 |
| 1772 | −7.5296 | −7.4407 |
| 1773 | −6.6200 | −8.4946 |
| 1774 | −7.9993 | −9.0258 |
| 1775 | −6.3060 | −6.5390 |
| 1776 | −6.7990 | −8.2406 |
| 1777 | −8.2639 | −7.5129 |
| 1778 | −6.8024 | −6.1851 |
| 1779 | −6.3710 | −6.1081 |
| 1780 | −0.1884 | −0.1974 |
| 1781 | 0.0630 | 0.0212 |
| 1782 | −0.1593 | 0.0161 |
| 1783 | −0.1986 | 0.1778 |
| 1784 | −0.3875 | 0.0668 |
| 1785 | −0.2767 | −0.0735 |
| 1786 | −0.0521 | 0.0535 |
| 1787 | −0.0411 | 0.0422 |
| 1788 | 0.0279 | 0.0954 |
| 1789 | −0.2818 | −0.1797 |
| 1790 | −0.1612 | −0.0269 |
| 1791 | −0.7223 | −0.3408 |
| 1792 | −0.5762 | −0.2876 |
| 1793 | −0.4251 | −0.3620 |
| 1794 | −0.5902 | −0.3558 |
| 1795 | −0.8636 | −0.6166 |
| 1796 | −0.4896 | −0.3574 |
| 1797 | −0.4587 | −0.1573 |
| 1798 | −0.2438 | −0.0925 |
| 1799 | −0.4909 | −0.2061 |
| 1800 | −0.1442 | 0.2151 |
| 1801 | −0.2613 | 0.0109 |
| 1802 | 0.1319 | 0.4170 |
| 1803 | −0.3857 | −0.1277 |
| 1804 | −0.7922 | −0.5104 |
| 1805 | −0.5321 | −0.3149 |
| 1806 | −0.5105 | −0.2379 |
| 1807 | −0.6972 | −0.4511 |
| 1808 | −0.6894 | −0.3097 |
| 1809 | −0.3541 | −0.1616 |
| 1810 | −0.1030 | 0.1145 |
| 1811 | −0.2913 | 0.0354 |
| 1812 | −0.1528 | −0.0261 |
| 1813 | −0.4516 | −0.2099 |
| 1814 | −0.0415 | 0.0676 |
| 1815 | −0.8562 | −0.4200 |
| 1816 | −0.5293 | −0.3130 |
| 1817 | −0.5385 | −0.4124 |
| 1818 | −0.8875 | −0.7021 |
| 1819 | −0.8401 | −0.3512 |
| 1820 | −0.9603 | −0.5111 |
| 1821 | −0.5072 | −0.2250 |
| 1822 | −0.7101 | −0.4904 |
| 1823 | −0.1407 | −0.0903 |
| 1824 | −0.4841 | −0.2374 |
| 1825 | −0.7444 | −0.4468 |
| 1826 | −0.4685 | −0.4209 |
| 1827 | −1.1487 | −0.6876 |
| 1828 | −0.9775 | −0.4930 |
| 1829 | −0.6419 | −0.4336 |
| 1830 | −0.9713 | −0.6332 |
| 1831 | −1.2048 | −0.8363 |
| 1832 | −0.9414 | −0.6845 |
| 1833 | −0.8650 | −0.4227 |
| 1834 | −0.7330 | −0.5104 |
| 1835 | −0.8299 | −0.5851 |
| 1836 | −0.6756 | −0.4104 |
| 1837 | −0.7582 | −0.4932 |
| 1838 | −0.7064 | −0.5193 |
| 1839 | −0.9313 | −0.5635 |
| 1840 | −0.9115 | −0.5955 |
| 1841 | −0.7666 | −0.5850 |
| 1842 | 0.3330 | 0.6989 |
| 1843 | −1.1336 | −0.7636 |
| 1844 | −0.9073 | −0.4203 |
| 1845 | −0.7322 | −0.4273 |
| 1846 | −0.6067 | −0.3803 |
| 1847 | −0.6621 | −0.2915 |
| 1848 | −0.5684 | −0.2679 |
| 1849 | −0.2442 | 0.1767 |
| 1850 | −0.6885 | −0.2766 |
| 1851 | −0.2024 | −0.0443 |
| 1852 | −0.7836 | −0.5007 |
| 1853 | −0.9128 | −0.8126 |
| 1854 | −0.6203 | −0.3000 |
| 1855 | −1.0918 | −0.8300 |
| 1856 | −0.6731 | −0.5059 |
| 1857 | −0.4437 | −0.3213 |
| 1858 | −0.7793 | −0.4156 |
| 1859 | −0.8957 | −0.7888 |
| 1860 | −0.7864 | −0.5661 |
| 1861 | −1.2462 | −1.0430 |
| 1862 | −0.8125 | −0.6872 |
| 1863 | −0.9854 | −0.7621 |
| 1864 | −1.3139 | −1.1053 |
| 1865 | −1.0066 | −0.8724 |
| 1866 | −1.1595 | −0.9364 |
| 1867 | −1.2108 | −0.8956 |
| 1868 | −0.9622 | −0.6591 |
| 1869 | −0.5790 | −0.2467 |
| 1870 | −0.8475 | −0.5533 |
| 1871 | −0.8507 | −0.6949 |
| 1872 | −0.7625 | −0.6283 |
| 1873 | −1.0223 | −0.7750 |
| 1874 | −0.7589 | −0.4061 |
| 1875 | −1.3819 | −1.0563 |
| 1876 | −1.2122 | −0.9972 |
| 1877 | −1.1499 | −1.0649 |
| 1878 | −0.1130 | 0.2623 |
| 1879 | −1.5241 | −1.0467 |
| 1880 | −1.3777 | −1.0445 |
| 1881 | −0.6467 | −0.3516 |
| 1882 | −0.7509 | −0.5474 |
| 1883 | −0.8189 | −0.6615 |
| 1884 | −0.7177 | −0.5154 |
| 1885 | −0.8996 | −0.6612 |
| 1886 | −0.7738 | −0.5940 |
| 1887 | −0.0443 | 0.0295 |
| 1888 | −0.1631 | −0.1600 |
| 1889 | 0.3001 | 0.4333 |
| 1890 | −0.2806 | −0.1864 |
| 1891 | −0.1069 | −0.0491 |
| 1892 | −0.0120 | 0.0387 |
| 1893 | −0.0968 | 0.0120 |
| 1894 | 2.2330 | 2.6485 |
| 1895 | 0.0577 | 0.1408 |
| 1896 | −0.2540 | −0.1755 |
| 1897 | −0.7489 | −0.5314 |
| 1898 | −0.3929 | −0.2966 |
| 1899 | −0.7261 | −0.5368 |
| 1900 | −0.7723 | −0.5430 |
| 1901 | −0.5906 | −0.3447 |
| 1902 | −0.3956 | −0.1664 |
| 1903 | −1.0014 | −0.8067 |
| 1904 | −0.4138 | −0.3394 |
| 1905 | 0.2333 | 0.2220 |
| 1906 | 0.0273 | 0.0660 |
| 1907 | 0.3920 | 0.3043 |
| 1908 | 0.2698 | 0.1577 |
| 1909 | −0.0868 | −0.1166 |
| 1910 | 0.1876 | 0.2034 |
| 1911 | −0.6276 | −0.4523 |
| 1912 | −0.5701 | −0.3586 |
| 1913 | −0.3595 | −0.3673 |
| 1914 | −0.2319 | −0.0034 |
| 1915 | −0.3561 | −0.2030 |
| 1916 | −0.4266 | −0.2215 |
| 1917 | −0.0909 | −0.0486 |
| 1918 | −0.1586 | −0.0592 |
| 1919 | 0.0130 | −0.0771 |
| 1920 | 0.0714 | 0.1665 |
| 1921 | −0.1455 | −0.1258 |
| 1922 | 0.0258 | 0.1298 |
| 1923 | −0.1644 | −0.1790 |
| 1924 | −0.0984 | −0.0910 |
| 1925 | −0.1995 | −0.2254 |
| 1926 | −0.5606 | −0.4220 |
| 1927 | −0.5821 | −0.5888 |
| 1928 | −0.1674 | −0.0622 |
| 1929 | −0.2583 | −0.2485 |
| 1930 | −0.3176 | −0.3128 |
| 1931 | −0.3263 | −0.3692 |
| 1932 | −0.3893 | −0.2425 |
| 1933 | −0.2021 | −0.0572 |
| 1934 | −0.3504 | −0.3393 |
| 1935 | −0.6217 | −0.4515 |
| 1936 | −0.7025 | −0.5324 |
| 1937 | −0.5436 | −0.5048 |
| 1938 | −0.5724 | −0.5725 |
| 1939 | −0.7523 | −0.6730 |
| 1940 | −0.6490 | −0.5514 |
| 1941 | −0.3388 | −0.2195 |
| 1942 | −0.6093 | −0.3722 |
| 1943 | −0.3920 | −0.2775 |
| 1944 | −0.0366 | −0.0747 |
| 1945 | −0.1956 | −0.1438 |
| 1946 | −0.2370 | −0.2130 |
| 1947 | −0.5926 | −0.5318 |
| 1948 | −0.4041 | −0.3099 |
| 1949 | −0.7922 | −0.5728 |
| 1950 | −0.7085 | −0.4343 |
| 1951 | −0.9558 | −0.7619 |
| 1952 | −0.5265 | −0.3775 |
| 1953 | −0.8583 | −0.5741 |
| 1954 | −0.5944 | −0.5618 |
| 1955 | −0.4876 | −0.3517 |
| 1956 | 0.1224 | 0.4003 |
| 1957 | −0.6369 | −0.3938 |
| 1958 | −0.4816 | −0.3366 |
| 1959 | 0.1016 | 0.2466 |
| 1960 | 0.2920 | 0.3992 |
| 1961 | −0.0340 | 0.0227 |
| 1962 | 0.0892 | 0.1377 |
| 1963 | −0.3507 | −0.1711 |
| 1964 | −0.0673 | 0.1250 |
| 1965 | 0.2510 | 0.2611 |
| 1966 | 0.0619 | 0.1618 |
| 1967 | −0.2646 | −0.1503 |
| 1968 | −0.4728 | −0.1537 |
| 1969 | −0.4412 | −0.3232 |
| 1970 | −0.1844 | −0.1264 |
| 1971 | −0.3877 | −0.1207 |
| 1972 | −0.3151 | −0.1486 |
| 1973 | −0.3772 | −0.2890 |
| 1974 | −0.2296 | −0.0463 |
| 1975 | −0.6615 | −0.4068 |
| 1976 | −0.3579 | −0.1165 |
| 1977 | −0.1260 | 0.0405 |
| 1978 | −0.3375 | −0.0468 |
| 1979 | −0.0578 | −0.0330 |
| 1980 | 0.2785 | 0.4414 |
| 1981 | 0.0003 | 0.1884 |
| 1982 | −0.0715 | 0.1504 |
| 1983 | −0.4546 | −0.2193 |
| 1984 | 0.0270 | 0.1030 |
| 1985 | −0.5039 | −0.2524 |
| 1986 | −0.1878 | 0.1550 |
| 1987 | −0.6160 | −0.2139 |
| 1988 | −0.5063 | −0.2076 |
| 1989 | −0.0546 | 0.1704 |
| 1990 | 0.0593 | 0.0710 |
| 1991 | −0.0966 | 0.0191 |
| 1992 | −0.0087 | 0.1861 |
| 1993 | −0.0221 | 0.2525 |
| 1994 | −0.0541 | 0.0957 |
| 1995 | −7.1129 | −8.0140 |
| 1996 | −3.4969 | −3.0592 |
| 1997 | −7.2803 | −8.3069 |
| 1998 | −7.5205 | −7.0877 |
| 1999 | −2.1667 | −1.7954 |
| 2000 | −7.4835 | −9.0950 |
| 2001 | −7.9785 | −6.5104 |
| 2002 | −3.7134 | −3.8140 |
| 2003 | −6.2523 | −6.1914 |
| 2004 | −2.2890 | −2.4537 |
| 2005 | −5.1505 | −6.2702 |
| 2006 | −6.8435 | −6.4107 |
| 2007 | −0.4196 | −0.1150 |
| 2008 | −1.0520 | −0.7302 |
| 2009 | −0.6689 | −0.3614 |
| 2010 | −1.1280 | −0.7370 |
| 2011 | −0.7297 | −0.4421 |
| 2012 | −0.2258 | −0.2086 |
| 2013 | −0.3872 | −0.4002 |
| 2014 | −1.4100 | −1.0541 |
| 2015 | −0.3620 | 0.1070 |
| 2016 | −1.3658 | −0.9739 |
| 2017 | −0.9439 | −0.5450 |
| 2018 | −1.4644 | −0.9636 |
| 2019 | −1.5257 | −1.3231 |
| 2020 | −1.8990 | −1.4184 |
| 2021 | −1.5937 | −1.0264 |
| 2022 | −1.9251 | −1.4781 |
| 2023 | −1.2324 | −1.0090 |
| 2024 | −1.0463 | −0.8770 |
| 2025 | −1.2407 | −0.7602 |
| 2026 | −1.2775 | −1.1026 |
| 2027 | −0.3669 | −0.2368 |
| 2028 | −1.3166 | −0.9760 |
| 2029 | −0.7655 | −0.6093 |
| 2030 | −1.3221 | −0.9845 |
| 2031 | −1.1173 | −0.9110 |
| 2032 | −1.3259 | −1.0798 |
| 2033 | −1.0403 | −0.6767 |
| 2034 | −1.6979 | −1.2635 |
| 2035 | −1.1355 | −0.7183 |
| 2036 | −0.9044 | −0.5234 |
| 2037 | −0.9799 | −0.6716 |
| 2038 | −0.9124 | −0.6817 |
| 2039 | −0.8085 | −0.5564 |
| 2040 | −1.6072 | −1.0276 |
| 2041 | −0.6837 | −0.3112 |
| 2042 | 0.1938 | 0.2889 |
| 2043 | −3.4340 | −2.9613 |
| 2044 | −3.6451 | −3.4329 |
| 2045 | −3.0815 | −2.1385 |
| 2046 | −6.2508 | −6.2774 |
| 2047 | −2.9912 | −2.5729 |
| 2048 | −6.1049 | −6.4116 |
| 2049 | 0.2738 | 0.3285 |
| 2050 | −3.4583 | −2.4849 |
| 2051 | −0.7885 | −0.5992 |
| 2052 | −0.6760 | −0.2805 |
| 2053 | −0.8185 | −0.5969 |
| 2054 | −0.7079 | −0.4781 |
| 2055 | −0.9373 | −0.5756 |
| 2056 | −0.5923 | −0.4757 |
| 2057 | −1.3648 | −0.9257 |
| 2058 | −1.3537 | −0.9649 |
| 2059 | −1.9742 | −1.6101 |
| 2060 | −1.1791 | −0.9268 |
| 2061 | −2.0230 | −1.8174 |
| 2062 | −0.8160 | −0.3559 |
| 2063 | −2.2503 | −1.5521 |
| 2064 | −1.7615 | −1.3870 |
| 2065 | −2.7534 | −2.2951 |
| 2066 | −1.5942 | −1.3235 |
| 2067 | −1.4763 | −1.1494 |
| 2068 | −1.6811 | −1.2483 |
| 2069 | −1.7062 | −1.2011 |
| 2070 | −1.8639 | −1.3988 |
| 2071 | −2.7005 | −2.0227 |
| 2072 | −1.7197 | −1.4910 |
| 2073 | −2.4276 | −2.0984 |
| 2074 | −1.6913 | −1.3619 |
| 2075 | −2.3759 | −1.6772 |
| 2076 | −1.9170 | −1.6590 |
| 2077 | −2.4998 | −2.1910 |
| 2078 | −6.1930 | −6.3979 |
| 2079 | −8.2315 | −7.3511 |
| 2080 | −6.6046 | −7.1547 |
| 2081 | −7.5199 | −7.3241 |
| 2082 | −8.4808 | −7.5074 |
| 2083 | −6.3439 | −6.4346 |
| 2084 | −7.7945 | −6.5315 |
| 2085 | −7.9254 | −7.9519 |
| 2086 | −7.6212 | −7.4362 |
| 2087 | −5.5354 | −6.8421 |
| 2088 | −7.9551 | −7.5342 |
| 2089 | −6.6892 | −6.6487 |
| 2090 | −7.2609 | −7.0811 |
| 2091 | −7.0093 | −7.0359 |
| 2092 | −6.6746 | −7.2668 |
| 2093 | −7.0587 | −7.2165 |
| 2094 | −7.2409 | −7.8525 |
| 2095 | −7.6750 | −7.1869 |
| 2096 | −7.3981 | −7.0096 |
| 2097 | −6.9914 | −7.0793 |
| 2098 | −7.1053 | −7.3856 |
| 2099 | −6.8415 | −7.3826 |
| 2100 | −7.2186 | −7.5822 |
| 2101 | −7.3201 | −6.9316 |
| 2102 | −1.5074 | −1.2811 |
| 2103 | −1.8092 | −1.3219 |
| 2104 | −2.2420 | −1.6432 |
| 2105 | −4.0394 | −3.3114 |
| 2106 | −2.1639 | −1.8367 |
| 2107 | −2.9623 | −2.6276 |
| 2108 | −2.1558 | −1.8272 |
| 2109 | −2.0790 | −1.8225 |
| 2110 | −2.5318 | −2.1639 |
| 2111 | −3.5708 | −3.2029 |
| 2112 | −4.2836 | −4.0471 |
| 2113 | −5.6754 | −4.8089 |
| 2114 | −2.2872 | −1.5584 |
| 2115 | −2.0962 | −1.3329 |
| 2116 | −3.0533 | −2.4936 |
| 2117 | −4.8962 | −3.9814 |
| 2118 | −2.4944 | −2.1846 |
| 2119 | −3.1702 | −2.5134 |
| 2120 | −2.4887 | −2.1038 |
| 2121 | −3.3787 | −2.7220 |
| 2122 | −3.3570 | −2.8306 |
| 2123 | −3.9780 | −3.2089 |
| 2124 | −4.9082 | −4.3916 |
| 2125 | −4.9938 | −4.6135 |
| 2126 | −6.3501 | −7.6176 |
| 2127 | −8.3811 | −6.6707 |
| 2128 | −6.1743 | −5.7942 |
| 2129 | −8.0430 | −7.9176 |
| 2130 | −6.2265 | −6.6819 |
| 2131 | −6.5847 | −7.1556 |
| 2132 | −6.9461 | −6.5804 |
| 2133 | −6.7787 | −7.9428 |
| 2134 | −7.8370 | −6.3192 |
| 2135 | −7.9526 | −7.2422 |
| 2136 | −6.6305 | −6.8415 |
| 2137 | −7.1300 | −6.4561 |
| 2138 | −7.4703 | −7.2904 |
| 2139 | −7.7484 | −6.7750 |
| 2140 | −7.5993 | −7.3914 |
| 2141 | −7.7304 | −6.7570 |
| 2142 | −6.1621 | −5.8805 |
| 2143 | −7.7433 | −7.9073 |
| 2144 | −7.7440 | −8.6775 |
| 2145 | −7.0123 | −7.6239 |
| 2146 | −7.2439 | −6.5824 |
| 2147 | −7.5752 | −6.8497 |
| 2148 | −7.3769 | −7.3421 |
| 2149 | −7.7776 | −7.5978 |
| 2150 | −2.0575 | −1.6267 |
| 2151 | −2.3368 | −1.8651 |
| 2152 | −1.9120 | −1.5449 |
| 2153 | −2.3980 | −2.0917 |
| 2154 | −3.2663 | −2.8623 |
| 2155 | −4.8796 | −4.3079 |
| 2156 | −3.3002 | −3.0325 |
| 2157 | −4.6416 | −4.4574 |
| 2158 | −3.9163 | −3.3601 |
| 2159 | −5.4142 | −4.7176 |
| 2160 | −4.1644 | −3.6385 |
| 2161 | −5.9788 | −4.6361 |
| 2162 | −3.2222 | −2.7782 |
| 2163 | −3.2154 | −2.7747 |
| 2164 | −3.5469 | −2.8251 |
| 2165 | −3.5743 | −3.2476 |
| 2166 | −4.0971 | −3.6427 |
| 2167 | −4.4595 | −4.7168 |
| 2168 | −4.1276 | −3.9375 |
| 2169 | −4.9133 | −4.8633 |
| 2170 | −4.2037 | −3.6701 |
| 2171 | −5.0278 | −4.8134 |
| 2172 | −5.1401 | −4.8641 |
| 2173 | −6.2487 | −5.4403 |
| 2174 | −0.7818 | −0.2572 |
| 2175 | −1.1647 | −0.7065 |
| 2176 | −0.6972 | −0.5144 |
| 2177 | −1.2337 | −0.5908 |
| 2178 | −1.4268 | −1.1690 |
| 2179 | −2.1819 | −1.7161 |
| 2180 | −1.5017 | −1.2484 |
| 2181 | −2.1866 | −1.4674 |
| 2182 | −1.3127 | −0.9854 |
| 2183 | −1.9032 | −1.3824 |
| 2184 | −1.2514 | −0.7584 |
| 2185 | −1.9248 | −1.3184 |
| 2186 | −1.5015 | −1.1899 |
| 2187 | −1.4431 | −1.1738 |
| 2188 | −1.3871 | −1.1524 |
| 2189 | −1.8664 | −1.3155 |
| 2190 | −1.5750 | −1.3127 |
| 2191 | −1.9796 | −1.6227 |
| 2192 | −1.8311 | −1.3821 |
| 2193 | −2.1552 | −1.8222 |
| 2194 | −1.4715 | −1.0805 |
| 2195 | −2.1865 | −1.5765 |
| 2196 | −2.0339 | −1.6387 |
| 2197 | −2.2254 | −1.7144 |
| 2198 | −1.7795 | −1.4328 |
| 2199 | −2.6067 | −2.0439 |
| 2200 | −2.4026 | −1.9950 |
| 2201 | −3.0365 | −2.4475 |
| 2202 | −3.4011 | −3.0782 |
| 2203 | −4.4363 | −3.8729 |
| 2204 | −3.5271 | −3.3537 |
| 2205 | −4.7059 | −4.6285 |
| 2206 | −4.0901 | −3.5182 |
| 2207 | −4.7711 | −4.9980 |
| 2208 | −4.1653 | −3.6234 |
| 2209 | −4.9909 | −5.6024 |
| 2210 | −3.1495 | −2.4609 |
| 2211 | −2.8322 | −2.1713 |
| 2212 | −3.0604 | −2.6731 |
| 2213 | −3.0516 | −2.2141 |
| 2214 | −4.6305 | −3.8080 |
| 2215 | −4.8833 | −4.5610 |
| 2216 | −4.3300 | −3.7308 |
| 2217 | −4.6819 | −4.4296 |
| 2218 | −4.6073 | −4.1158 |
| 2219 | −4.5222 | −4.5383 |
| 2220 | −4.4873 | −4.6877 |
| 2221 | −5.4480 | −5.1367 |
| 2222 | −1.2439 | −0.8960 |
| 2223 | −1.5563 | −1.2030 |
| 2224 | −1.2838 | −0.9762 |
| 2225 | −0.8131 | −0.4098 |
| 2226 | −1.3225 | −1.0301 |
| 2227 | −2.5101 | −1.9090 |
| 2228 | −1.2945 | −1.0838 |
| 2229 | −2.6822 | −2.2227 |
| 2230 | −1.5998 | −1.3212 |
| 2231 | −2.2939 | −1.9974 |
| 2232 | −2.3573 | −1.9314 |
| 2233 | −3.3666 | −2.6318 |
| 2234 | −1.7897 | −1.5619 |
| 2235 | −2.0935 | −1.6687 |
| 2236 | −1.6048 | −1.2642 |
| 2237 | −2.3975 | −1.9737 |
| 2238 | −1.9837 | −1.5714 |
| 2239 | −2.4290 | −1.9829 |
| 2240 | −2.0479 | −1.7776 |
| 2241 | −2.3309 | −2.0609 |
| 2242 | −2.0274 | −1.6006 |
| 2243 | −2.4904 | −1.9721 |
| 2244 | −2.3668 | −1.9443 |
| 2245 | −2.5718 | −2.4181 |
| 2246 | −0.8184 | −0.5806 |
| 2247 | −1.1633 | −0.7744 |
| 2248 | −0.9278 | −0.6495 |
| 2249 | −1.6247 | −1.2168 |
| 2250 | −1.6170 | −1.4078 |
| 2251 | −2.2170 | −1.9320 |
| 2252 | −1.5645 | −1.2449 |
| 2253 | −2.8079 | −2.0905 |
| 2254 | −1.5100 | −1.2488 |
| 2255 | −2.3309 | −1.7567 |
| 2256 | −2.3471 | −1.8227 |
| 2257 | −3.1226 | −2.5655 |
| 2258 | −1.9112 | −1.4898 |
| 2259 | −1.7833 | −1.4333 |
| 2260 | −1.7458 | −1.4594 |
| 2261 | −2.6705 | −2.2130 |
| 2262 | −1.9613 | −1.5111 |
| 2263 | −2.7667 | −2.0650 |
| 2264 | −2.2105 | −1.9408 |
| 2265 | −2.7392 | −2.1935 |
| 2266 | −2.0635 | −1.5094 |
| 2267 | −2.4373 | −2.1211 |
| 2268 | −2.5504 | −2.1783 |
| 2269 | −3.2395 | −2.6058 |
| 2270 | −2.0031 | −1.7616 |
| 2271 | −3.2258 | −3.3167 |
| 2272 | −2.3862 | −2.1318 |
| 2273 | −4.6783 | −4.2810 |
| 2274 | −2.0372 | −1.7937 |
| 2275 | −3.1606 | −2.6225 |
| 2276 | −2.4579 | −2.0565 |
| 2277 | −3.6676 | −2.9314 |
| 2278 | −1.1501 | −0.8472 |
| 2279 | −3.2526 | −3.0015 |
| 2280 | −2.4979 | −2.3557 |
| 2281 | −3.2407 | −2.9977 |
| 2282 | −1.5486 | −1.2211 |
| 2283 | −4.2665 | −4.1530 |
| 2284 | −3.5851 | −3.0282 |
| 2285 | −4.9308 | −4.9574 |
| 2286 | −1.2799 | −0.9454 |
| 2287 | −2.7853 | −2.7768 |
| 2288 | −2.6621 | −2.3995 |
| 2289 | −3.2150 | −2.9177 |
| 2290 | −1.1698 | −1.0625 |
| 2291 | −3.0877 | −3.1558 |
| 2292 | −2.6007 | −2.1461 |
| 2293 | −3.2241 | −2.8990 |
| 2294 | −1.6521 | −1.2327 |
| 2295 | −3.1722 | −2.5055 |
| 2296 | −2.1402 | −1.5261 |
| 2297 | −2.1627 | −1.9035 |
| 2298 | −3.3346 | −2.9767 |
| 2299 | −1.6818 | −1.3810 |
| 2300 | −2.5294 | −2.1143 |
| 2301 | −4.1665 | −3.8541 |
| 2302 | −3.3350 | −2.6324 |
| 2303 | −3.6988 | −3.1743 |
| 2304 | −5.0074 | −4.4755 |
| 2305 | −0.8429 | −0.6314 |
| 2306 | −1.7300 | −1.3646 |
| 2307 | −3.3179 | −2.8547 |
| 2308 | −2.1262 | −1.7765 |
| 2309 | −2.4509 | −2.1063 |
| 2310 | −4.2183 | −3.8607 |
| 2311 | −2.5259 | −1.9417 |
| 2312 | −3.0899 | −2.6366 |
| 2313 | −5.2052 | −5.0339 |
| 2314 | −3.5200 | −3.1739 |
| 2315 | −4.5495 | −4.4087 |
| 2316 | −5.5160 | −5.3094 |
| 2317 | −1.2348 | −0.9428 |
| 2318 | −0.9673 | −0.6696 |
| 2319 | −2.2909 | −2.0971 |
| 2320 | −1.6534 | −1.3962 |
| 2321 | −2.0250 | −1.3635 |
| 2322 | −3.4271 | −2.7214 |
| 2323 | −2.1433 | −1.7101 |
| 2324 | −2.0710 | −1.7141 |
| 2325 | −4.2877 | −3.5465 |
| 2326 | −2.9483 | −2.3515 |
| 2327 | −3.1067 | −2.8808 |
| 2328 | −4.8101 | −4.5336 |
| 2329 | −1.2253 | −0.8411 |
| 2330 | −1.4536 | −1.1744 |
| 2331 | −3.0190 | −2.6746 |
| 2332 | −2.2468 | −1.8325 |
| 2333 | −2.5098 | −2.0612 |
| 2334 | −3.6436 | −3.1441 |
| 2335 | −1.8349 | −1.5164 |
| 2336 | −2.2984 | −2.0919 |
| 2337 | −4.2329 | −4.3872 |
| 2338 | −2.8997 | −2.6184 |
| 2339 | −3.4806 | −3.0253 |
| 2340 | −4.6965 | −5.0584 |
| 2341 | −1.2750 | −1.0242 |
| 2342 | −0.9919 | −0.5382 |
| 2343 | −1.1110 | −0.1115 |
| 2344 | −2.4636 | −1.7482 |
| 2345 | −2.3947 | −1.9788 |
| 2346 | −3.8343 | −3.7963 |
| 2347 | −2.5409 | −2.2272 |
| 2348 | −1.1621 | −0.4115 |
| 2349 | −5.4185 | −5.6056 |
| 2350 | −3.9129 | −3.4974 |
| 2351 | −3.8474 | −3.3321 |
| 2352 | −5.5369 | −5.4030 |
| 2353 | −0.9872 | −0.8463 |
| 2354 | −1.7729 | −1.1504 |
| 2355 | −3.4378 | −3.1656 |
| 2356 | −1.3882 | −1.0757 |
| 2357 | −2.7989 | −2.3021 |
| 2358 | −3.7588 | −3.6605 |
| 2359 | −2.5332 | −2.0110 |
| 2360 | −3.3817 | −3.0034 |
| 2361 | −5.4682 | −5.2183 |
| 2362 | −3.8863 | −3.5909 |
| 2363 | −5.1907 | −3.9884 |
| 2364 | −5.8138 | −5.7148 |
| 2365 | −1.5634 | −1.0344 |
| 2366 | −0.8701 | −0.6795 |
| 2367 | −2.8881 | −2.5794 |
| 2368 | −2.0596 | −1.6264 |
| 2369 | −2.3899 | −1.8587 |
| 2370 | −3.1556 | −2.4635 |
| 2371 | −2.7582 | −2.3304 |
| 2372 | −1.9147 | −1.6748 |
| 2373 | −4.2736 | −4.3109 |
| 2374 | −2.8749 | −2.4160 |
| 2375 | −3.4913 | −3.0880 |
| 2376 | −4.1777 | −4.5404 |
| 2377 | −1.4958 | −1.1395 |
| 2378 | −1.3546 | −1.0467 |
| 2379 | −3.5045 | −3.0544 |
| 2380 | −2.1692 | −1.6532 |
| 2381 | −2.4256 | −2.0734 |
| 2382 | −3.7444 | −3.6355 |
| 2383 | −3.1415 | −2.4233 |
| 2384 | −3.0577 | −2.6921 |
| 2385 | −5.3615 | −5.4827 |
| 2386 | −4.1305 | −3.8102 |
| 2387 | −4.6299 | −4.2336 |
| 2388 | −4.9895 | −5.1898 |
| 2389 | −1.5476 | −1.0863 |
| 2390 | −2.1864 | −1.8697 |
| 2391 | −2.6470 | −2.1051 |
| 2392 | −4.3671 | −4.7018 |
| 2393 | −3.4281 | −3.0664 |
| 2394 | −3.2244036 | −3.03416 |
| 2395 | −5.7428663 | −5.60897 |
| 2396 | −3.7571948 | −3.68972 |
| 2397 | −4.6622996 | −4.3086 |
| 2398 | −6.3901301 | −6.12124 |
| 2399 | −4.2512773 | −4.36734 |
| 2400 | −4.6003386 | −4.85087 |
| 2401 | −5.7540541 | −5.55823 |
| 2402 | −1.1998086 | −0.90182 |
| 2403 | −2.6938442 | −2.17817 |
| 2404 | −3.6247429 | −3.19543 |
| 2405 | −1.3007316 | −0.93601 |
| 2406 | −1.665633 | −1.39317 |
| 2407 | −3.3129689 | −2.89234 |
| 2408 | −3.5978822 | −3.70323 |
| 2409 | −1.6714951 | −1.18417 |
| 2410 | −0.6443582 | −0.05381 |
| 2411 | −3.3064288 | −2.8295 |
| 2412 | −5.0439452 | −4.53115 |
| 2413 | −1.6257667 | −1.27789 |
| 2414 | −2.2081452 | −1.91854 |
| 2415 | −3.7917037 | −3.40508 |
| 2416 | −5.2299972 | −5.45966 |
| 2417 | −2.0306575 | −1.60323 |
| 2418 | −3.1938703 | −2.59631 |
| 2419 | −3.1020778 | −2.63171 |
| 2420 | −4.0866251 | −4.16129 |
| 2421 | −2.6919731 | −2.15643 |
| 2422 | −3.0223734 | −3.08196 |
| 2423 | −3.5472507 | −2.81784 |
| 2424 | −4.3000111 | −4.05433 |
| 2425 | −2.7697687 | −2.39115 |
| 2426 | −3.9607477 | −4.11782 |
| 2427 | −3.6215616 | −3.71456 |
| 2428 | −5.4364436 | −5.56685 |
| 2429 | −3.3792833 | −2.91573 |
| 2430 | −4.9416692 | −4.724 |
| 2431 | −4.2123107 | −3.62946 |
| 2432 | −5.6371064 | −5.77471 |
| 2433 | −0.9552548 | −0.54186 |
| 2434 | −2.0904641 | −1.72769 |
| 2435 | −2.6361393 | −2.17521 |
| 2436 | −4.7644931 | −4.68502 |
| 2437 | −1.2263682 | −0.98215 |
| 2438 | −2.1259115 | −1.97525 |
| 2439 | −3.1396055 | −2.70105 |
| 2440 | −5.4744989 | −5.00099 |
| 2441 | −1.4783296 | −1.28835 |
| 2442 | −2.945823 | −2.64344 |
| 2443 | −3.6499764 | −3.18021 |
| 2444 | −6.746999 | −6.39917 |
| 2445 | −1.5437518 | −1.21134 |
| 2446 | −3.3531229 | −3.02631 |
| 2447 | −3.5907464 | −3.21483 |
| 2448 | −6.9172713 | −5.73439 |
| 2449 | −2.3640097 | −1.82885 |
| 2450 | −3.9405414 | −3.79419 |
| 2451 | −3.9522309 | −3.55349 |
| 2452 | −5.3619735 | −5.79863 |
| 2453 | −3.1092079 | −2.51519 |
| 2454 | −4.8881069 | −4.87883 |
| 2455 | −3.9529068 | −3.61109 |
| 2456 | −5.6247684 | −6.35178 |
| 2457 | −3.0368398 | −2.6967 |
| 2458 | −5.4937076 | −5.71061 |
| 2459 | −4.445899 | −4.01174 |
| 2460 | −3.7118987 | −2.58093 |
| 2461 | −3.5066298 | −2.80782 |
| 2462 | −6.4886684 | −6.73763 |
| 2463 | −4.791343 | −4.1585 |
| 2464 | −6.8496709 | −7.12778 |
| 2465 | −1.8442973 | −1.23897 |
| 2466 | −1.0662757 | −0.92975 |
| 2467 | −0.9172488 | −0.64154 |
| 2468 | −1.343801 | −1.13897 |
| 2469 | −1.0569375 | −1.0193 |
| 2470 | −0.9641409 | −0.84884 |
| 2471 | −1.6991112 | −1.35393 |
| 2472 | −1.1482473 | −0.99507 |
| 2473 | −2.2826271 | −1.71223 |
| 2474 | −0.7834575 | −0.60894 |
| 2475 | −1.9516205 | −1.47074 |
| 2476 | −0.8849024 | −0.61833 |
| 2477 | −1.0042589 | −0.75109 |
| 2478 | −0.768967 | −0.57988 |
| 2479 | −1.975371 | −1.51916 |
| 2480 | −1.4702561 | −1.07803 |
| 2481 | −1.0746524 | −0.90539 |
| 2482 | −0.8654849 | −0.73141 |
| 2483 | −0.8323908 | −0.61654 |
| 2484 | −1.5370961 | −0.9676 |
| 2485 | −1.4174268 | −1.06563 |
| 2486 | −1.5507766 | −1.05531 |
| 2487 | −0.740465 | −0.62047 |
| 2488 | −0.7281564 | −0.68761 |
| 2489 | −1.3858569 | −0.7984 |
| 2490 | −2.0566707 | −1.66902 |
| 2491 | −1.9862039 | −1.79892 |
| 2492 | −2.6676277 | −2.23875 |
| 2493 | −1.7611844 | −1.42816 |
| 2494 | −2.7157335 | −1.88194 |
| 2495 | −3.0882586 | −2.39104 |
| 2496 | −1.9364893 | −1.5058 |
| 2497 | −2.5334174 | −1.75483 |
| 2498 | −2.9649654 | −2.21136 |
| 2499 | −2.8221448 | −1.96575 |
| 2500 | −3.0827193 | −2.23837 |
| 2501 | −3.3226189 | −3.09228 |
| 2502 | −0.7451109 | −0.49476 |
| 2503 | −0.4172012 | −0.15043 |
| 2504 | −0.8026727 | −0.70425 |
| 2505 | −0.631294 | −0.50701 |
| 2506 | −0.8920533 | −0.72663 |
| 2507 | −1.2207223 | −1.09637 |
| 2508 | −1.468937 | −1.10591 |
| 2509 | −1.3182826 | −0.86912 |
| 2510 | −1.3150213 | −0.93068 |
| 2511 | −1.211751 | −0.79402 |
| 2512 | −0.6299349 | −0.55684 |
| 2513 | −1.3181023 | −1.00404 |
| 2514 | −1.9384823 | −1.49145 |
| 2515 | −0.7789869 | −0.56773 |
| 2516 | −1.5499598 | −1.17679 |
| 2517 | −1.348204 | −0.98181 |
| 2518 | −0.955361 | −0.4166 |
| 2519 | −0.7541713 | −0.60457 |
| 2520 | −1.5217027 | −1.05495 |
| 2521 | −1.6101307 | −1.10727 |
| 2522 | −1.8296628 | −1.40671 |
| 2523 | −1.4010485 | −1.12222 |
| 2524 | −1.8819491 | −1.38106 |
| 2525 | −1.1862519 | −0.63257 |
| 2526 | −1.2483563 | −0.65803 |
| 2527 | −1.6421789 | −1.15805 |
| 2528 | −2.22162 | −1.81946 |
| 2529 | −2.4782051 | −2.22973 |
| 2530 | −3.9579347 | −3.49781 |
| 2531 | −1.2096058 | −0.99288 |
| 2532 | −1.6775047 | −1.25703 |
| 2533 | −1.044021 | −0.91189 |
| 2534 | −2.2355167 | −1.62897 |
| 2535 | −1.6877766 | −1.28834 |
| 2536 | 0.02724083 | 0.784222 |
| 2537 | −1.4903288 | −0.9019 |
| 2538 | −1.5998599 | −1.41219 |
| 2539 | −1.7039935 | −1.30276 |
| 2540 | −1.1637701 | −0.91641 |
| 2541 | −1.4936506 | −1.19049 |
| 2542 | −1.1432239 | −0.87427 |
| 2543 | −2.2571491 | −2.10763 |
| 2544 | −0.8651703 | −0.74435 |
| 2545 | −1.4673999 | −1.20295 |
| 2546 | −1.1834394 | −0.94604 |
| 2547 | −1.1495841 | −0.81489 |
| 2548 | −0.8218145 | −0.79598 |
| 2549 | −0.7429876 | −0.77766 |
| 2550 | −1.8530822 | −1.56741 |
| 2551 | −1.7196975 | −1.3944 |
| 2552 | −1.1969268 | −0.74649 |
| 2553 | −1.3933533 | −1.12938 |
| 2554 | −1.6290546 | −1.39462 |
| 2555 | −2.3299007 | −1.8233 |
| 2556 | −2.93717 | −2.55668 |
| 2557 | −0.9019328 | −0.72441 |
| 2558 | −3.419818 | −3.08284 |
| 2559 | −1.9535045 | −1.62134 |
| 2560 | −1.349957 | −1.13037 |
| 2561 | −2.8695668 | −2.38107 |
| 2562 | −0.8395943 | −0.64683 |
| 2563 | −1.2455191 | −1.0339 |
| 2564 | −1.6914905 | −1.35227 |
| 2565 | −1.5440732 | −1.47301 |
| 2566 | −2.288956 | −1.98762 |
| 2567 | −2.4867525 | −1.88543 |
| 2568 | −0.7615909 | −0.55264 |
| 2569 | −0.7306614 | −0.53445 |
| 2570 | −1.5689512 | −1.16903 |
| 2571 | −1.6184381 | −1.13484 |
| 2572 | −1.5978315 | −1.01401 |
| 2573 | −1.8840855 | −1.62831 |
| 2574 | −1.5696043 | −1.06584 |
| 2575 | −1.6548671 | −1.21801 |
| 2576 | −1.0867712 | −0.77671 |
| 2577 | −1.7189417 | −1.32657 |
| 2578 | −1.2091111 | −1.04735 |
| 2579 | −1.056773 | −0.7984 |
| 2580 | −1.6086941 | −1.22806 |
| 2581 | −0.8908394 | −0.91648 |
| 2582 | −1.0966939 | −0.97929 |
| 2583 | −0.6758699 | −0.6938 |
| 2584 | −1.4888911 | −0.9447 |
| 2585 | −0.9416641 | −0.59133 |
| 2586 | 1.0872418 | 1.99433 |
| 2587 | −1.5358263 | −1.14766 |
| 2588 | −1.2510645 | −0.99248 |
| 2589 | −1.4260377 | −1.17687 |
| 2590 | −1.617369 | −1.23074 |
| 2591 | −1.3032917 | −1.10247 |
| 2592 | −1.138094 | −0.83178 |
| 2593 | −1.4258585 | −1.16598 |
| 2594 | −1.3568068 | −0.95222 |
| 2595 | −1.3538859 | −0.65488 |
| 2596 | −1.4728943 | −1.18834 |
| 2597 | −1.3440397 | −1.01486 |
| 2598 | −0.8687717 | −0.36232 |
| 2599 | −1.5591755 | −1.05773 |
| 2600 | −1.1094687 | −0.68192 |
| 2601 | −1.6662385 | −1.05614 |
| 2602 | −1.1622842 | −0.56222 |
| 2603 | −2.0571823 | −1.51761 |
| 2604 | −2.0460547 | −1.36318 |
| 2605 | −1.9547626 | −1.30995 |
| 2606 | −1.5522903 | −1.03328 |
| 2607 | −1.730117 | −1.28007 |
| 2608 | −1.6485331 | −1.15145 |
| 2609 | −1.5013049 | −1.08455 |
| 2610 | −1.6406066 | −1.24156 |
| 2611 | −1.715239 | −1.3998 |
| 2612 | −2.1452755 | −1.85154 |
| 2613 | −0.2313744 | 0.381126 |
| 2614 | −1.7688496 | −1.39891 |
| 2615 | −2.483645 | −1.88315 |
| 2616 | −1.6905582 | −1.27752 |
| 2617 | −4.9549009 | −4.28103 |
| 2618 | −5.0640567 | −5.18374 |
| 2619 | −1.4010726 | −0.90183 |
| 2620 | −1.276142 | −1.01086 |
| 2621 | −1.3836097 | −0.86505 |
| 2622 | −1.1953284 | −0.88708 |
| 2623 | −1.6628601 | −1.2592 |
| 2624 | −1.7796949 | −1.56974 |
| 2625 | −1.2053754 | −0.87014 |
| 2626 | −1.3221893 | −1.0371 |
| 2627 | −1.3017623 | −0.98456 |
| 2628 | −1.7778425 | −1.46748 |
| 2629 | −0.536355 | −0.45638 |
| 2630 | −0.9516366 | −0.7336 |
| 2631 | −1.0044283 | −0.79755 |
| 2632 | −1.188787 | −0.98523 |
| 2633 | −0.8366792 | −0.56098 |
| 2634 | −0.9221736 | −0.79839 |
| 2635 | −0.9532542 | −0.61156 |
| 2636 | −1.2654204 | −0.91689 |
| 2637 | −0.8353265 | −0.52821 |
| 2638 | −0.6644217 | −0.62686 |
| 2639 | −1.115754 | −0.78081 |
| 2640 | −1.1977378 | −0.74374 |
| 2641 | −2.062537 | −1.67286 |
| 2642 | −1.0535857 | −0.82071 |
| 2643 | −1.761709 | −1.3486 |
| 2644 | −6.3310061 | −5.80299 |
| 2645 | −2.0972254 | −1.49791 |
| 2646 | −0.253332 | 0.060851 |
| 2647 | −1.3806913 | −0.91729 |
| 2648 | −1.3265892 | −0.9581 |
| 2649 | −1.67489 | −1.21814 |
| 2650 | −1.9512512 | −1.48689 |
| 2651 | −1.8010266 | −1.42827 |
| 2652 | −6.5749452 | −6.12758 |
| 2653 | −2.4658991 | −1.68639 |
| 2654 | −3.2543849 | −2.73095 |
| 2655 | −1.319048 | −0.85289 |
| 2656 | −1.6601983 | −1.26504 |
| 2657 | −1.1338138 | −0.87975 |
| 2658 | −2.416775 | −1.81909 |
| 2659 | −2.3961048 | −1.87639 |
| 2660 | −3.1192493 | −2.38701 |
| 2661 | −2.6166433 | −1.99705 |
| 2662 | −3.9458821 | −3.36979 |
| 2663 | −2.5765975 | −1.96871 |
| 2664 | −3.1717375 | −2.70293 |
| 2665 | −4.5649517 | −3.68153 |
| 2666 | −3.6184972 | −3.385 |
| 2667 | −4.9749445 | −4.96835 |
| 2668 | −4.8768597 | −4.17473 |
| 2669 | −1.3871124 | −0.84097 |
| 2670 | −0.2228668 | 0.165601 |
| 2671 | −0.426376 | −0.12278 |
| 2672 | −0.2244834 | 0.146588 |
| 2673 | −0.2328573 | 0.12926 |
| 2674 | −0.5513359 | −0.12122 |
| 2675 | −0.4143876 | −0.01217 |
| 2676 | 0.72846811 | 1.022007 |
| 2677 | −0.0193746 | 0.331152 |
| 2678 | −0.178882 | 0.149153 |
| 2679 | −0.1030894 | 0.394592 |
| 2680 | 0.19396402 | 0.611923 |
| 2681 | −0.2898463 | 0.074417 |
| 2682 | −0.3675817 | −0.0785 |
| 2683 | −0.6233649 | −0.00046 |
| 2684 | −0.3323308 | −0.0602 |
| 2685 | −0.3873451 | −0.17892 |
| 2686 | −0.2770517 | −0.18569 |
| 2687 | −0.4180592 | −0.08773 |
| 2688 | −0.1241845 | 0.293618 |
| 2689 | −0.1850324 | 0.150474 |
| 2690 | −0.0353577 | 0.097671 |

TABLE 9
Plasmids

| ID | Description | DNA sequence |
|---|---|---|
| pSL3352 | pUC57_Tn6677_TnL_cargo_TnR (800 bp-miniTn) | 5153 |
| pSL1022 | pCDF_Vch_PT7_CRISPR(Target4)_QCascade_TnsABC_T7Term | 5154 |
| pSL1236 | pDonor | 5155 |
| pSL1022 | pEffector encoding the guide RNA that recognizes target 4 | 5156 |
| pSL4277 | pEffector encoding the guide RNA that recognizes target 5 | 5157 |
| pSL4278 | pEffector encoding the guide RNA that recognizes target 6 | 5158 |
| pSL4279 | pEffector encoding the guide RNA that recognizes target 7 | 5159 |
| pSL4196 | pTarget: Target 4_Downstream 4 | 5160 |
| pSL4200 | pTarget: Target 4_Downstream 5 | 5161 |
| pSL4201 | pTarget: Target 4_Downstream 6 | 5162 |
| pSL4202 | pTarget: Target 4_Downstream 7 | 5163 |
| pSL4197 | pTarget: Target 5_Downstream 5 | 5164 |
| pSL4203 | pTarget: Target 5_Downstream 4 | 5165 |
| pSL4198 | pTarget: Target 6_Downstream 6 | 5166 |
| pSL4204 | pTarget: Target 6_Downstream 4 | 5167 |
| pSL4199 | pTarget: Target 7_Downstream 7 | 5168 |
| pSL4205 | pTarget: Target 7_Downstream 4 | 5169 |
| pSL3937 | pCDF_Vch_PJ23119_CRISPR(tSL0004)_QCascade_TnsABC_300 | 5170 |
| | bp-miniTn(Tn7R(56 bp)_99 bp_Tn7L)_SmR | |
| pSL3524 | pDonor_TnR(WT_H.0001) | 5171 |
| pSL3567 | pDonor_TnR(ORF1a_H.0141) | 5172 |
| pSL3568 | pDonor_TnR(ORF1b_H.0189) | 5173 |
| pSL3569 | pDonor_TnR(ORF1c_H.0213) | 5174 |
| pSL3572 | pDonor_TnR(ORF2a_H.0452) | 5175 |
| pSL3570 | pDonor_TnR(ORF3a_H.0506) | 5176 |
| pSL3573 | pDonor_TnR(ORF3b_H.0597) | 5177 |
| pSL3574 | pDonor_TnR(ORF3c_H.0645) | 5178 |
| pSL3571 | oDonor_TnR(ORF3d_H.0653) | 5179 |
| pSL0001 | pUC19 | 5180 |
| pSL3496 | pCOLA_T7_sfGFP1-10_32AA_sfGFP11 | 5181 |
| pSL3497 | pCOLA_T7_sfGFP1-10_32AA | 5182 |
| pSL0008 | pCOLADuet-1 | 5183 |
| pSL3616 | pUC19_TnR(132 bp WT)_Pcat_sfGFP11_TnL | 5184 |
| pSL3498 | pUC57_TnR(WT)_sfGFP11_TnL | 5185 |
| pSL4187 | pCOLA_T7_sfGFP1-10_TnR(WT)_sfGFP11 | 5186 |
| pSL4188 | pCOLA_T7_sfGFP1-10_TnR(ORF1a)_sfGFP11 | 5187 |
| pSL4189 | pCOLA_T7_sfGFP1-10_TnR(ORF1b)_sfGFP11 | 5188 |
| pSL4190 | pCOLA_T7_sfGFP1-10_TnR(ORF1c)_sfGFP11 | 5189 |
| pSL4191 | pCOLA_T7_sfGFP1-10_TnR(ORF2a)_sfGFP11 | 5190 |
| pSL4192 | pCOLA_T7_sfGFP1-10_TnR(ORF3a)_sfGFP11 | 5191 |
| pSL4193 | pCOLA_T7_sfGFP1-10_TnR(ORF3b)_sfGFP11 | 5192 |
| pSL4194 | pCOLA_T7_sfGFP1-10_TnR(ORF3c)_sfGFP11 | 5193 |
| pSL4195 | pCOLA_T7_sfGFP1-10_TnR(ORF3d)_sfGFP11 | 5194 |
| pSL3494 | pCOLA_T7_sfGFP | 5195 |
| pSL1021 | pEffector_crRNA-nt | 5196 |
| pSL4283 | pEffector_crRNA-505 (msrB) | 5197 |
| pSL4450 | pSIM6_pSC101_Donor_TnR(WT)_GGS | 5198 |
| | linker_sfGFP_T7Term_TnL | |
| pSL4451 | pSIM6_pSC101_Donor_TnR(ORF2a)_GGS | 5199 |
| | linker_sfGFP_T7Term_TnL | |
| pSL4052 | pACYC_T7_IHFa_IHFb | 5200 |
| pSL2383 | pSPIN_Tn7007_atypical | 5201 |
| pSL2372 | pSPIN_Tn7011_atypical | 5202 |
| pSL2376 | pSPIN_Tn7014_atypical | 5203 |
| pSL2386 | pSPIN_Tn7016_atypical | 5204 |
| pSL2370 | pSPIN_Tn7000_atypical | 5205 |
| pSL1213 | pCDFL_Vch_PT7_CRISPR(Target4)_QCascade_TnsABC_Tn7R_{—} | 5206 |
| | CmR_Tn7L | |
| pSL1131 | pCDFL_Vch_PJ23101_CRISPR(Target4)_QCascade_TnsABC_{—} | 5207 |
| | Tn7R_CmR_Tn7L | |
| pSL1796 | pCDFL_Vch_PJ23119_CRISPR(Target4)_QCascade_TnsABC | 5208 |
| pSL5047 | pUC57_Tn6677_TnR_cargo_TnR (800 bp- | 5209 |
| | miniTn_symmetric_ends_R-R) | |
| pSL5048 | pUC57_Tn6677_TnL_cargo_TnL (800 bp- | 5210 |
| | miniTn_symmetric_ends_L-L) | |
| pSL4306 | pCDF_Tn7_J23119_TnsABCD_TnL_genomic-PBSs_TnR | 5211 |
| pSL1233 | pSC101_PAM_MSC1_T7_MSC2 | 5212 |
| pSL2684 | pSIM6_pSC101_GamBetaExo | 5213 |
| pSL4218 | | 5214 |
| pSL4373 | | 5215 |
| pSL4374 | | 5216 |
| pSL4050 | pACYC_bCO_scIHF2 | 5217 |
| pSL4134 | hCO dcIHFA-NLS | 5218 |
| pSL4135 | hCO NLS-dcIHFA | 5219 |
| pSL4136 | hCO dcIHFB-NLS | 5220 |
| pSL4137 | hCO NLS-dcIHFB | 5221 |
| pSL4146 | hCO NLS-scIHF2 | 5222 |
| pSL4147 | hCO scIHF2 | 5223 |
| pSL4170 | TnsA-NLS-GSGSGG-IHF-XTEN-GS-TnsB | 5224 |
| pSL4171 | TnsA-NLS-GSGSGG-XTEN-IHF-XTEN-GS-TnsB | 5225 |
| pSL4172 | TnsA-NLS-(GGS)6-IHF-(XTEN)3-TnsB | 5226 |
| pSL4173 | TnsA-NLS-(XTEN)3-IHF-(GGS)6-TnsB | 5227 |
| pSL4178 | IHF-dCas9 | 5228 |

[0295] The scope of the present invention is not limited by what has been specifically shown and described hereinabove. Those skilled in the art will recognize that there are suitable alternatives to the depicted examples of materials, configurations, constructions, and dimensions. Variations, modifications, and other implementations of what is described herein will occur to those of ordinary skill in the art without departing from the spirit and scope of the invention.

[0296] Numerous references, including patents and various publications, are cited and discussed in the description of this invention. The citation and discussion of such references is provided merely to clarify the description of the present invention and is not an admission that any reference is prior art to the invention described herein. All references cited and discussed in this specification are incorporated herein by reference in their entirety.

1. A system for RNA-guided nucleic acid modification, comprising:
a) an engineered Clustered Regularly Interspaced Short Palindromic Repeats (CRISPR)-associated transposon (CAST) system or one or more nucleic acids encoding the engineered CAST system, wherein the CAST system comprises at least one or all of:
i) at least one Cas protein;
ii) at least one transposon-associated protein; and
iii) at least one guide RNA (gRNA) complementary to at least a portion of a target nucleic acid sequence; and
b) a donor nucleic acid comprising a cargo nucleic acid sequence flanked by at least one or both of: an engineered transposon right end sequence or an engineered transposon left end sequence; and/or
c) at least one integration co-factor protein, or a nucleic acid encoding thereof.

2. The system of claim 1, wherein the engineered transposon right end sequence and/or the engineered left end sequence encodes an amino acid linker sequence.

3. The system of claim 1, wherein the engineered transposon right end sequence and/or the engineered left end sequence is fully or partially AT rich.

4. The system of claim 1, wherein the engineered transposon right end sequence and/or the engineered left end sequence comprises at least two TnsB binding sites (TBSs).

5. The system of claim 4, wherein each TBS comprises a sequence individually selected from: CAMCCATAWRDTGATAWYKH (SEO ID NO: 11), or CMMCBRWAWNNTGAHWWYWN (SEO ID NO: 12),
wherein each M is individually A or C; each W is independently A or T; each R is independently A or G; each D is independently A, G or T; each Y is independently T or C; each K is G or T; B is G, T, or C; and each H is independently A, C or T.

6. The system of claim 1, wherein the engineered transposon right end sequence and/or the engineered left end sequence comprises a 5 to 8 bp terminal end sequence.

7. The system of claim 1, wherein the engineered transposon right end sequence is at least about 75 basepairs (bp).

8. The system of claim 1, wherein the engineered transposon right end sequence comprises a sequence of:
SEQ ID NO: 1, or a variant sequence having one or more additions, substitutions, or deletions thereof,
any of SEQ ID NOs: 2-8;
any of SEQ ID NOs: 18-844;
SEQ ID NOs: 9, or a variant sequence having one or more additions, substitutions, or deletions thereof,
any of SEQ ID NOs: 845-2690;
any of SEQ ID NOs: 2691-2702; or
any of SEQ ID NOs: 2703-3119.

9. The system of claim 1, wherein the engineered transposon left end sequence is at least about 115 basepairs (bp).

10. The system of claim 1, wherein the engineered transposon left end sequence further comprises an Integration Host Factor (IHF) binding site (IBS), wherein the IBS comprises a sequence of WATCARNNNNTTR, wherein W is A or T, R is A or G, and N is any nucleotide.

11. The system of claim 1, wherein the engineered transposon left end sequence comprises a sequence of:
SEQ ID NO: 10, or a variant sequence having one or more substitutions thereof.
any of SEQ ID NOs: 3120-4665;
any of SEQ ID NOs: 4666-4673; or
any of SEQ ID NOs: 4674-5135.

12. The system of claim 1, wherein the cargo nucleic acid sequence encodes a peptide tag or a polypeptide.

13. The system of claim 1, wherein the at least one integration co-factor protein comprises Integration Host Factor (IHF), Factor for Inversion Stimulation (Fis), or a combination thereof.

14. The system of claim 1, wherein the engineered transposon right end sequence and/or the engineered transposon left end sequence is derived from Vibrio cholerae Tn6677 or Pseudoalteromonas Tn7016.

15. A method for DNA integration or labeling a gene product, comprising contacting a target nucleic acid sequence with the system of claim 1.

The application's sequence listing, which the Patent Office published only in electronic form, follows.

SEQUENCE LISTING (5844 sequences)

SEQ ID NO: 1 - DNA, 57 bp, synthetic construct
  source 1..57: mol_type = other DNA
tgttgatacaaccataaaatgataattacacccataaattgataattatcacaccca

SEQ ID NO: 2 - DNA, 57 bp, synthetic construct
  source 1..57: mol_type = other DNA
tgtggatacaaccataaaatgataattacacccataaatggatcattatcaccccca

SEQ ID NO: 3 - DNA, 57 bp, synthetic construct
  source 1..57: mol_type = other DNA
tgtggatacaaccataaaacgataattacacccataaatggatcattatcacaccca

SEQ ID NO: 4 - DNA, 57 bp, synthetic construct
  source 1..57: mol_type = other DNA
tgtggatccaaccataaaatgataattacacccataaatggatcattatcacaccca

SEQ ID NO: 5 - DNA, 57 bp, synthetic construct
  source 1..57: mol_type = other DNA
tgttgatacaaccataaaaggattattacacccattaattgataattatcacaccca

SEQ ID NO: 6 - DNA, 57 bp, synthetic construct
  source 1..57: mol_type = other DNA
tgttgatacaaccatcaaatggtaattacacccataaattgataattatcacaccca

SEQ ID NO: 7 - DNA, 57 bp, synthetic construct
  source 1..57: mol_type = other DNA
tgttgatacaaccattaaatgataattccacccataatttgataattatcacaccca

SEQ ID NO: 8 - DNA, 57 bp, synthetic construct
  source 1..57: mol_type = other DNA
tgttgatacaaccattaaatggtaattccacccaaatattgataattatcacaccca

SEQ ID NO: 9 - DNA, 75 bp, synthetic construct
  source 1..75: mol_type = other DNA
tgttgatacaaccataaaatgataattacacccataaattgataattatcacacccataaattgatattgcctct

SEQ ID NO: 10 - DNA, 115 bp, synthetic construct
  source 1..115: mol_type = other DNA
tgttgatgcaaccataaagtgatatttaataattatttataatcagcaacttaaccacaaaacaaccatatattgatatctcacaaaacaaccataagttgatatttttgtgaat

SEQ ID NO: 11 - DNA, 20 bp, synthetic construct
  source 1..20: mol_type = other DNA
camccatawrdtgatawykh

SEQ ID NO: 12 - DNA, 20 bp, synthetic construct
  source 1..20: mol_type = other DNA
cmmcbrwawnntgahwwywn

SEQ ID NO: 13 - DNA, 14 bp, synthetic construct
  source 1..14: mol_type = other DNA
aatcagcaaactta

SEQ ID NO: 14 - DNA, 13 bp, synthetic construct
  source 1..13: mol_type = other DNA
ccgactcaacggc

SEQ ID NO: 15 - protein, 16 aa, synthetic construct
KRPAATKKAGQAKKKK

SEQ ID NO: 16 - protein, 25 aa, synthetic construct
MSRRRKANPTKLSENAKKLAKEVEN

SEQ ID NO: 17 - protein, 18 aa, synthetic construct
KRTADGSEFESPKKKRKV

SEQ ID NO: 18 - DNA, 57 bp, synthetic construct; identical to SEQ ID NO: 1
  source 1..57: mol_type = other DNA

SEQ ID NO: 19 - DNA, 57 bp, synthetic construct; identical to SEQ ID NO: 1
  source 1..57: mol_type = other DNA

SEQ ID NO: 20 - DNA, 57 bp, synthetic construct; identical to SEQ ID NO: 1
  source 1..57: mol_type = other DNA

SEQ ID NO: 21 - DNA, 57 bp, synthetic construct; identical to SEQ ID NO: 1
  source 1..57: mol_type = other DNA

SEQ ID NO: 22 - DNA, 57 bp, synthetic construct
  source 1..57: mol_type = other DNA
tgtcgatacaaccataaaatgataattacacccataaattgataattatcacaccca

SEQ ID NO: 23 - DNA, 57 bp, synthetic construct
  source 1..57: mol_type = other DNA
tgtggatacaaccataaaatgataattacacccataaattgataattatcacaccca

SEQ ID NO: 24 - DNA, 57 bp, synthetic construct
  source 1..57: mol_type = other DNA
tgttcatacaaccataaaatgataattacacccataaattgataattatcacaccca

SEQ ID NO: 25 - DNA, 57 bp, synthetic construct
  source 1..57: mol_type = other DNA
tgttgatacaaccataaaatgataattacacccataaatggataattatcacaccca

SEQ ID NO: 26 - DNA, 57 bp, synthetic construct
  source 1..57: mol_type = other DNA
tgttgatacaaccataaaatgataattacacccataaattcataattatcacaccca

SEQ ID NO: 27 - DNA, 57 bp, synthetic construct
  source 1..57: mol_type = other DNA
tgtcgatacaaccataaaatgataattacacccataaatggataattatcacaccca

SEQ ID NO: 28 - DNA, 57 bp, synthetic construct
  source 1..57: mol_type = other DNA
tgtcgatacaaccataaaatgataattacacccataaattcataattatcacaccca

SEQ ID NO: 29 - DNA, 57 bp, synthetic construct
  source 1..57: mol_type = other DNA
tgtggatacaaccataaaatgataattacacccataaatggataattatcacaccca

SEQ ID NO: 30 - DNA, 57 bp, synthetic construct
  source 1..57: mol_type = other DNA
tgtggatacaaccataaaatgataattacacccataaattcataattatcacaccca

SEQ ID NO: 31 - DNA, 57 bp, synthetic construct
  source 1..57: mol_type = other DNA
tgttcatacaaccataaaatgataattacacccataaatggataattatcacaccca

SEQ ID NO: 32 - DNA, 57 bp, synthetic construct
  source 1..57: mol_type = other DNA
tgttcatacaaccataaaatgataattacacccataaattcataattatcacaccca

SEQ ID NO: 33 - DNA, 57 bp, synthetic construct
  source 1..57: mol_type = other DNA
tgttgatacaaccataaaatgataattacacccataaattgatcattatcacaccca

SEQ ID NO: 34 - DNA, 57 bp, synthetic construct
  source 1..57: mol_type = other DNA
tgtcgatacaaccataaaatgataattacacccataaattgatcattatcacaccca

SEQ ID NO: 35 - DNA, 57 bp, synthetic construct
  source 1..57: mol_type = other DNA
tgtggatacaaccataaaatgataattacacccataaattgatcattatcacaccca

SEQ ID NO: 36 - DNA, 57 bp, synthetic construct
  source 1..57: mol_type = other DNA
tgttcatacaaccataaaatgataattacacccataaattgatcattatcacaccca

SEQ ID NO: 37 - DNA, 57 bp, synthetic construct
  source 1..57: mol_type = other DNA
tgttgatacaaccataaaatgataattacacccataaatggatcattatcacaccca

SEQ ID NO: 38 - DNA, 57 bp, synthetic construct
  source 1..57: mol_type = other DNA
tgttgatacaaccataaaatgataattacacccataaattcatcattatcacaccca

SEQ ID NO: 39 - DNA, 57 bp, synthetic construct
  source 1..57: mol_type = other DNA
tgtcgatacaaccataaaatgataattacacccataaatggatcattatcacaccca

SEQ ID NO: 40 - DNA, 57 bp, synthetic construct
  source 1..57: mol_type = other DNA
tgtcgatacaaccataaaatgataattacacccataaattcatcattatcacaccca

SEQ ID NO: 41 - DNA, 57 bp, synthetic construct
  source 1..57: mol_type = other DNA
tgtggatacaaccataaaatgataattacacccataaatggatcattatcacaccca

SEQ ID NO: 42 - DNA, 57 bp, synthetic construct
  source 1..57: mol_type = other DNA
tgtggatacaaccataaaatgataattacacccataaattcatcattatcacaccca

SEQ ID NO: 43 - DNA, 57 bp, synthetic construct
  source 1..57: mol_type = other DNA
tgttcatacaaccataaaatgataattacacccataaatggatcattatcacaccca

SEQ ID NO: 44 - DNA, 57 bp, synthetic construct
  source 1..57: mol_type = other DNA
tgttcatacaaccataaaatgataattacacccataaattcatcattatcacaccca

SEQ ID NO: 45 - DNA, 57 bp, synthetic construct
  source 1..57: mol_type = other DNA
ggttgatacaaccataaaatgataattacacccataaattgataattatcacaccca

SEQ ID NO: 46 - DNA, 57 bp, synthetic construct
  source 1..57: mol_type = other DNA
ggtcgatacaaccataaaatgataattacacccataaattgataattatcacaccca

SEQ ID NO: 47 - DNA, 57 bp, synthetic construct
  source 1..57: mol_type = other DNA
ggtggatacaaccataaaatgataattacacccataaattgataattatcacaccca

SEQ ID NO: 48 - DNA, 57 bp, synthetic construct
  source 1..57: mol_type = other DNA
ggttcatacaaccataaaatgataattacacccataaattgataattatcacaccca

SEQ ID NO: 49 - DNA, 57 bp, synthetic construct
  source 1..57: mol_type = other DNA
ggttgatacaaccataaaatgataattacacccataaatggataattatcacaccca

SEQ ID NO: 50 - DNA, 57 bp, synthetic construct
  source 1..57: mol_type = other DNA
ggttgatacaaccataaaatgataattacacccataaattcataattatcacaccca

SEQ ID NO: 51 - DNA, 57 bp, synthetic construct
  source 1..57: mol_type = other DNA
ggtcgatacaaccataaaatgataattacacccataaatggataattatcacaccca

SEQ ID NO: 52 - DNA, 57 bp, synthetic construct
  source 1..57: mol_type = other DNA
ggtcgatacaaccataaaatgataattacacccataaattcataattatcacaccca

SEQ ID NO: 53 - DNA, 57 bp, synthetic construct
  source 1..57: mol_type = other DNA
ggtggatacaaccataaaatgataattacacccataaatggataattatcacaccca

SEQ ID NO: 54 - DNA, 57 bp, synthetic construct
  source 1..57: mol_type = other DNA
ggtggatacaaccataaaatgataattacacccataaattcataattatcacaccca

SEQ ID NO: 55 - DNA, 57 bp, synthetic construct
  source 1..57: mol_type = other DNA
ggttcatacaaccataaaatgataattacacccataaatggataattatcacaccca

SEQ ID NO: 56 - DNA, 57 bp, synthetic construct
  source 1..57: mol_type = other DNA
ggttcatacaaccataaaatgataattacacccataaattcataattatcacaccca

SEQ ID NO: 57 - DNA, 57 bp, synthetic construct
  source 1..57: mol_type = other DNA
ggttgatacaaccataaaatgataattacacccataaattgatcattatcacaccca

SEQ ID NO: 58 - DNA, 57 bp, synthetic construct
  source 1..57: mol_type = other DNA
ggtcgatacaaccataaaatgataattacacccataaattgatcattatcacaccca

SEQ ID NO: 59 - DNA, 57 bp, synthetic construct
  source 1..57: mol_type = other DNA
ggtggatacaaccataaaatgataattacacccataaattgatcattatcacaccca

SEQ ID NO: 60 - DNA, 57 bp, synthetic construct
  source 1..57: mol_type = other DNA
ggttcatacaaccataaaatgataattacacccataaattgatcattatcacaccca

SEQ ID NO: 61 - DNA, 57 bp, synthetic construct
  source 1..57: mol_type = other DNA
ggttgatacaaccataaaatgataattacacccataaatggatcattatcacaccca

SEQ ID NO: 62 - DNA, 57 bp, synthetic construct
  source 1..57: mol_type = other DNA
ggttgatacaaccataaaatgataattacacccataaattcatcattatcacaccca

SEQ ID NO: 63 - DNA, 57 bp, synthetic construct
  source 1..57: mol_type = other DNA
ggtcgatacaaccataaaatgataattacacccataaatggatcattatcacaccca

SEQ ID NO: 64 - DNA, 57 bp, synthetic construct
  source 1..57: mol_type = other DNA
ggtcgatacaaccataaaatgataattacacccataaattcatcattatcacaccca

SEQ ID NO: 65 - DNA, 57 bp, synthetic construct
  source 1..57: mol_type = other DNA
ggtggatacaaccataaaatgataattacacccataaatggatcattatcacaccca

SEQ ID NO: 66 - DNA, 57 bp, synthetic construct
  source 1..57: mol_type = other DNA
ggtggatacaaccataaaatgataattacacccataaattcatcattatcacaccca

SEQ ID NO: 67 - DNA, 57 bp, synthetic construct
  source 1..57: mol_type = other DNA
ggttcatacaaccataaaatgataattacacccataaatggatcattatcacaccca

SEQ ID NO: 68 - DNA, 57 bp, synthetic construct
  source 1..57: mol_type = other DNA
ggttcatacaaccataaaatgataattacacccataaattcatcattatcacaccca

SEQ ID NO: 69 - DNA, 57 bp, synthetic construct
  source 1..57: mol_type = other DNA
tcttgatacaaccataaaatgataattacacccataaattgataattatcacaccca

SEQ ID NO: 70 - DNA, 57 bp, synthetic construct
  source 1..57: mol_type = other DNA
tctcgatacaaccataaaatgataattacacccataaattgataattatcacaccca

SEQ ID NO: 71 - DNA, 57 bp, synthetic construct
  source 1..57: mol_type = other DNA
tctggatacaaccataaaatgataattacacccataaattgataattatcacaccca

SEQ ID NO: 72 - DNA, 57 bp, synthetic construct
  source 1..57: mol_type = other DNA
tcttcatacaaccataaaatgataattacacccataaattgataattatcacaccca

SEQ ID NO: 73 - DNA, 57 bp, synthetic construct
  source 1..57: mol_type = other DNA
tcttgatacaaccataaaatgataattacacccataaatggataattatcacaccca

SEQ ID NO: 74 - DNA, 57 bp, synthetic construct
  source 1..57: mol_type = other DNA
tcttgatacaaccataaaatgataattacacccataaattcataattatcacaccca

SEQ ID NO: 75 - DNA, 57 bp, synthetic construct
  source 1..57: mol_type = other DNA
tctcgatacaaccataaaatgataattacacccataaatggataattatcacaccca

SEQ ID NO: 76 - DNA, 57 bp, synthetic construct
  source 1..57: mol_type = other DNA
tctcgatacaaccataaaatgataattacacccataaattcataattatcacaccca

SEQ ID NO: 77 - DNA, 57 bp, synthetic construct
  source 1..57: mol_type = other DNA
tctggatacaaccataaaatgataattacacccataaatggataattatcacaccca

SEQ ID NO: 78 - DNA, 57 bp, synthetic construct
  source 1..57: mol_type = other DNA
tctggatacaaccataaaatgataattacacccataaattcataattatcacaccca

SEQ ID NO: 79 - DNA, 57 bp, synthetic construct
  source 1..57: mol_type = other DNA
tcttcatacaaccataaaatgataattacacccataaatggataattatcacaccca

SEQ ID NO: 80 - DNA, 57 bp, synthetic construct
  source 1..57: mol_type = other DNA
tcttcatacaaccataaaatgataattacacccataaattcataattatcacaccca

SEQ ID NO: 81 - DNA, 57 bp, synthetic construct
  source 1..57: mol_type = other DNA
tcttgatacaaccataaaatgataattacacccataaattgatcattatcacaccca

SEQ ID NO: 82 - DNA, 57 bp, synthetic construct
  source 1..57: mol_type = other DNA
tctcgatacaaccataaaatgataattacacccataaattgatcattatcacaccca

SEQ ID NO: 83 - DNA, 57 bp, synthetic construct
  source 1..57: mol_type = other DNA
tctggatacaaccataaaatgataattacacccataaattgatcattatcacaccca

SEQ ID NO: 84 - DNA, 57 bp, synthetic construct
  source 1..57: mol_type = other DNA
tcttcatacaaccataaaatgataattacacccataaattgatcattatcacaccca

SEQ ID NO: 85 - DNA, 57 bp, synthetic construct
  source 1..57: mol_type = other DNA
tcttgatacaaccataaaatgataattacacccataaatggatcattatcacaccca

SEQ ID NO: 86 - DNA, 57 bp, synthetic construct
  source 1..57: mol_type = other DNA
tcttgatacaaccataaaatgataattacacccataaattcatcattatcacaccca

SEQ ID NO: 87 - DNA, 57 bp, synthetic construct
  source 1..57: mol_type = other DNA
tctcgatacaaccataaaatgataattacacccataaatggatcattatcacaccca

SEQ ID NO: 88 - DNA, 57 bp, synthetic construct
  source 1..57: mol_type = other DNA
tctcgatacaaccataaaatgataattacacccataaattcatcattatcacaccca

SEQ ID NO: 89 - DNA, 57 bp, synthetic construct
  source 1..57: mol_type = other DNA
tctggatacaaccataaaatgataattacacccataaatggatcattatcacaccca

SEQ ID NO: 90 - DNA, 57 bp, synthetic construct
  source 1..57: mol_type = other DNA
tctggatacaaccataaaatgataattacacccataaattcatcattatcacaccca

SEQ ID NO: 91 - DNA, 57 bp, synthetic construct
  source 1..57: mol_type = other DNA
tcttcatacaaccataaaatgataattacacccataaatggatcattatcacaccca

SEQ ID NO: 92 - DNA, 57 bp, synthetic construct
  source 1..57: mol_type = other DNA
tcttcatacaaccataaaatgataattacacccataaattcatcattatcacaccca

SEQ ID NO: 93 - DNA, 57 bp, synthetic construct
  source 1..57: mol_type = other DNA
agttgatacaaccataaaatgataattacacccataaattgataattatcacaccca

SEQ ID NO: 94 - DNA, 57 bp, synthetic construct
  source 1..57: mol_type = other DNA
agtcgatacaaccataaaatgataattacacccataaattgataattatcacaccca

SEQ ID NO: 95 - DNA, 57 bp, synthetic construct
  source 1..57: mol_type = other DNA
agtggatacaaccataaaatgataattacacccataaattgataattatcacaccca

SEQ ID NO: 96 - DNA, 57 bp, synthetic construct
  source 1..57: mol_type = other DNA
agttcatacaaccataaaatgataattacacccataaattgataattatcacaccca

SEQ ID NO: 97 - DNA, 57 bp, synthetic construct
  source 1..57: mol_type = other DNA
agttgatacaaccataaaatgataattacacccataaatggataattatcacaccca

SEQ ID NO: 98 - DNA, 57 bp, synthetic construct
  source 1..57: mol_type = other DNA
agttgatacaaccataaaatgataattacacccataaattcataattatcacaccca

SEQ ID NO: 99 - DNA, 57 bp, synthetic construct
  source 1..57: mol_type = other DNA
agtcgatacaaccataaaatgataattacacccataaatggataattatcacaccca

SEQ ID NO: 100 - DNA, 57 bp, synthetic construct
  source 1..57: mol_type = other DNA
agtcgatacaaccataaaatgataattacacccataaattcataattatcacaccca

SEQ ID NO: 101 - DNA, 57 bp, synthetic construct
  source 1..57: mol_type = other DNA
agtggatacaaccataaaatgataattacacccataaatggataattatcacaccca

SEQ ID NO: 102 - DNA, 57 bp, synthetic construct
  source 1..57: mol_type = other DNA
agtggatacaaccataaaatgataattacacccataaattcataattatcacaccca

SEQ ID NO: 103 - DNA, 57 bp, synthetic construct
  source 1..57: mol_type = other DNA
agttcatacaaccataaaatgataattacacccataaatggataattatcacaccca

SEQ ID NO: 104 - DNA, 57 bp, synthetic construct
  source 1..57: mol_type = other DNA
agttcatacaaccataaaatgataattacacccataaattcataattatcacaccca

SEQ ID NO: 105 - DNA, 57 bp, synthetic construct
  source 1..57: mol_type = other DNA
agttgatacaaccataaaatgataattacacccataaattgatcattatcacaccca

SEQ ID NO: 106 - DNA, 57 bp, synthetic construct
  source 1..57: mol_type = other DNA
agtcgatacaaccataaaatgataattacacccataaattgatcattatcacaccca

SEQ ID NO: 107 - DNA, 57 bp, synthetic construct
  source 1..57: mol_type = other DNA
agtggatacaaccataaaatgataattacacccataaattgatcattatcacaccca

SEQ ID NO: 108 - DNA, 57 bp, synthetic construct
  source 1..57: mol_type = other DNA
agttcatacaaccataaaatgataattacacccataaattgatcattatcacaccca

SEQ ID NO: 109 - DNA, 57 bp, synthetic construct
  source 1..57: mol_type = other DNA
agttgatacaaccataaaatgataattacacccataaatggatcattatcacaccca

SEQ ID NO: 110 - DNA, 57 bp, synthetic construct
  source 1..57: mol_type = other DNA
agttgatacaaccataaaatgataattacacccataaattcatcattatcacaccca

SEQ ID NO: 111 - DNA, 57 bp, synthetic construct
  source 1..57: mol_type = other DNA
agtcgatacaaccataaaatgataattacacccataaatggatcattatcacaccca

SEQ ID NO: 112 - DNA, 57 bp, synthetic construct
  source 1..57: mol_type = other DNA
agtcgatacaaccataaaatgataattacacccataaattcatcattatcacaccca

SEQ ID NO: 113 - DNA, 57 bp, synthetic construct
  source 1..57: mol_type = other DNA
agtggatacaaccataaaatgataattacacccataaatggatcattatcacaccca

SEQ ID NO: 114 - DNA, 57 bp, synthetic construct
  source 1..57: mol_type = other DNA
agtggatacaaccataaaatgataattacacccataaattcatcattatcacaccca

SEQ ID NO: 115 - DNA, 57 bp, synthetic construct
  source 1..57: mol_type = other DNA
agttcatacaaccataaaatgataattacacccataaatggatcattatcacaccca

SEQ ID NO: 116 - DNA, 57 bp, synthetic construct
  source 1..57: mol_type = other DNA
agttcatacaaccataaaatgataattacacccataaattcatcattatcacaccca

SEQ ID NO: 117 - DNA, 57 bp, synthetic construct
  source 1..57: mol_type = other DNA
tgttgatacaaccctaaaatgataattacacccataaattgataattatcacaccca

SEQ ID NO: 118 - DNA, 57 bp, synthetic construct
  source 1..57: mol_type = other DNA
tgtcgatacaaccctaaaatgataattacacccataaattgataattatcacaccca

SEQ ID NO: 119 - DNA, 57 bp, synthetic construct
  source 1..57: mol_type = other DNA
tgtggatacaaccctaaaatgataattacacccataaattgataattatcacaccca

SEQ ID NO: 120 - DNA, 57 bp, synthetic construct
  source 1..57: mol_type = other DNA
tgttcatacaaccctaaaatgataattacacccataaattgataattatcacaccca

SEQ ID NO: 121 - DNA, 57 bp, synthetic construct
  source 1..57: mol_type = other DNA
tgttgatacaaccctaaaatgataattacacccataaatggataattatcacaccca

SEQ ID NO: 122 - DNA, 57 bp, synthetic construct
  source 1..57: mol_type = other DNA
tgttgatacaaccctaaaatgataattacacccataaattcataattatcacaccca

SEQ ID NO: 123 - DNA, 57 bp, synthetic construct
  source 1..57: mol_type = other DNA
tgtcgatacaaccctaaaatgataattacacccataaatggataattatcacaccca

SEQ ID NO: 124 - DNA, 57 bp, synthetic construct
  source 1..57: mol_type = other DNA
tgtcgatacaaccctaaaatgataattacacccataaattcataattatcacaccca

SEQ ID NO: 125 - DNA, 57 bp, synthetic construct
  source 1..57: mol_type = other DNA
tgtggatacaaccctaaaatgataattacacccataaatggataattatcacaccca

SEQ ID NO: 126 - DNA, 57 bp, synthetic construct
  source 1..57: mol_type = other DNA
tgtggatacaaccctaaaatgataattacacccataaattcataattatcacaccca

SEQ ID NO: 127 - DNA, 57 bp, synthetic construct
  source 1..57: mol_type = other DNA
tgttcatacaaccctaaaatgataattacacccataaatggataattatcacaccca

SEQ ID NO: 128 - DNA, 57 bp, synthetic construct
  source 1..57: mol_type = other DNA
tgttcatacaaccctaaaatgataattacacccataaattcataattatcacaccca

SEQ ID NO: 129 - DNA, 57 bp, synthetic construct
  source 1..57: mol_type = other DNA
tgttgatacaaccctaaaatgataattacacccataaattgatcattatcacaccca

SEQ ID NO: 130 - DNA, 57 bp, synthetic construct
  source 1..57: mol_type = other DNA
tgtcgatacaaccctaaaatgataattacacccataaattgatcattatcacaccca

SEQ ID NO: 131 - DNA, 57 bp, synthetic construct
  source 1..57: mol_type = other DNA
tgtggatacaaccctaaaatgataattacacccataaattgatcattatcacaccca

SEQ ID NO: 132 - DNA, 57 bp, synthetic construct
  source 1..57: mol_type = other DNA
tgttcatacaaccctaaaatgataattacacccataaattgatcattatcacaccca

SEQ ID NO: 133 - DNA, 57 bp, synthetic construct
  source 1..57: mol_type = other DNA
tgttgatacaaccctaaaatgataattacacccataaatggatcattatcacaccca

SEQ ID NO: 134 - DNA, 57 bp, synthetic construct
  source 1..57: mol_type = other DNA
tgttgatacaaccctaaaatgataattacacccataaattcatcattatcacaccca

SEQ ID NO: 135 - DNA, 57 bp, synthetic construct
  source 1..57: mol_type = other DNA
tgtcgatacaaccctaaaatgataattacacccataaatggatcattatcacaccca

SEQ ID NO: 136 - DNA, 57 bp, synthetic construct
  source 1..57: mol_type = other DNA
tgtcgatacaaccctaaaatgataattacacccataaattcatcattatcacaccca

SEQ ID NO: 137 - DNA, 57 bp, synthetic construct
  source 1..57: mol_type = other DNA
tgtggatacaaccctaaaatgataattacacccataaatggatcattatcacaccca

SEQ ID NO: 138 - DNA, 57 bp, synthetic construct
  source 1..57: mol_type = other DNA
tgtggatacaaccctaaaatgataattacacccataaattcatcattatcacaccca

SEQ ID NO: 139 - DNA, 57 bp, synthetic construct
  source 1..57: mol_type = other DNA
tgttcatacaaccctaaaatgataattacacccataaatggatcattatcacaccca

SEQ ID NO: 140 - DNA, 57 bp, synthetic construct
  source 1..57: mol_type = other DNA
tgttcatacaaccctaaaatgataattacacccataaattcatcattatcacaccca

SEQ ID NO: 141 - DNA, 57 bp, synthetic construct
  source 1..57: mol_type = other DNA
tgttgatacaaccataaaatgataattacacccataaattgataattatcaccccca

SEQ ID NO: 142 - DNA, 57 bp, synthetic construct
  source 1..57: mol_type = other DNA
tgtcgatacaaccataaaatgataattacacccataaattgataattatcaccccca

SEQ ID NO: 143 - DNA, 57 bp, synthetic construct
  source 1..57: mol_type = other DNA
tgtggatacaaccataaaatgataattacacccataaattgataattatcaccccca

SEQ ID NO: 144 - DNA, 57 bp, synthetic construct
  source 1..57: mol_type = other DNA
tgttcatacaaccataaaatgataattacacccataaattgataattatcaccccca

SEQ ID NO: 145 - DNA, 57 bp, synthetic construct
  source 1..57: mol_type = other DNA
tgttgatacaaccataaaatgataattacacccataaatggataattatcaccccca

SEQ ID NO: 146 - DNA, 57 bp, synthetic construct
  source 1..57: mol_type = other DNA
tgttgatacaaccataaaatgataattacacccataaattcataattatcaccccca

SEQ ID NO: 147 - DNA, 57 bp, synthetic construct
  source 1..57: mol_type = other DNA
tgtcgatacaaccataaaatgataattacacccataaatggataattatcaccccca

SEQ ID NO: 148 - DNA, 57 bp, synthetic construct
  source 1..57: mol_type = other DNA
tgtcgatacaaccataaaatgataattacacccataaattcataattatcaccccca

SEQ ID NO: 149 - DNA, 57 bp, synthetic construct
  source 1..57: mol_type = other DNA
tgtggatacaaccataaaatgataattacacccataaatggataattatcaccccca

SEQ ID NO: 150 - DNA, 57 bp, synthetic construct
  source 1..57: mol_type = other DNA
tgtggatacaaccataaaatgataattacacccataaattcataattatcaccccca

SEQ ID NO: 151 - DNA, 57 bp, synthetic construct
  source 1..57: mol_type = other DNA
tgttcatacaaccataaaatgataattacacccataaatggataattatcaccccca

SEQ ID NO: 152 - DNA, 57 bp, synthetic construct
  source 1..57: mol_type = other DNA
tgttcatacaaccataaaatgataattacacccataaattcataattatcaccccca

SEQ ID NO: 153 - DNA, 57 bp, synthetic construct
  source 1..57: mol_type = other DNA
tgttgatacaaccataaaatgataattacacccataaattgatcattatcaccccca

SEQ ID NO: 154 - DNA, 57 bp, synthetic construct
  source 1..57: mol_type = other DNA
tgtcgatacaaccataaaatgataattacacccataaattgatcattatcaccccca

SEQ ID NO: 155 - DNA, 57 bp, synthetic construct
  source 1..57: mol_type = other DNA
tgtggatacaaccataaaatgataattacacccataaattgatcattatcaccccca

SEQ ID NO: 156 - DNA, 57 bp, synthetic construct
  source 1..57: mol_type = other DNA
tgttcatacaaccataaaatgataattacacccataaattgatcattatcaccccca

SEQ ID NO: 157 - DNA, 57 bp, synthetic construct
  source 1..57: mol_type = other DNA
tgttgatacaaccataaaatgataattacacccataaatggatcattatcaccccca

SEQ ID NO: 158 - DNA, 57 bp, synthetic construct
  source 1..57: mol_type = other DNA
tgttgatacaaccataaaatgataattacacccataaattcatcattatcaccccca

SEQ ID NO: 159 - DNA, 57 bp, synthetic construct
  source 1..57: mol_type = other DNA
tgtcgatacaaccataaaatgataattacacccataaatggatcattatcaccccca

SEQ ID NO: 160 - DNA, 57 bp, synthetic construct
  source 1..57: mol_type = other DNA
tgtcgatacaaccataaaatgataattacacccataaattcatcattatcaccccca

SEQ ID NO: 161 - DNA, 57 bp, synthetic construct; identical to SEQ ID NO: 2
  source 1..57: mol_type = other DNA

SEQ ID NO: 162 - DNA, 57 bp, synthetic construct
  source 1..57: mol_type = other DNA
tgtggatacaaccataaaatgataattacacccataaattcatcattatcaccccca

SEQ ID NO: 163 - DNA, 57 bp, synthetic construct
  source 1..57: mol_type = other DNA
tgttcatacaaccataaaatgataattacacccataaatggatcattatcaccccca

SEQ ID NO: 164 - DNA, 57 bp, synthetic construct
  source 1..57: mol_type = other DNA
tgttcatacaaccataaaatgataattacacccataaattcatcattatcaccccca

SEQ ID NO: 165 - DNA, 57 bp, synthetic construct
  source 1..57: mol_type = other DNA
tgttgatacaaccctaaaatgataattacacccataaattgataattatcaccccca

SEQ ID NO: 166 - DNA, 57 bp, synthetic construct
  source 1..57: mol_type = other DNA
tgtcgatacaaccctaaaatgataattacacccataaattgataattatcaccccca

SEQ ID NO: 167 - DNA, 57 bp, synthetic construct
  source 1..57: mol_type = other DNA
tgtggatacaaccctaaaatgataattacacccataaattgataattatcaccccca

SEQ ID NO: 168 - DNA, 57 bp, synthetic construct
  source 1..57: mol_type = other DNA
tgttcatacaaccctaaaatgataattacacccataaattgataattatcaccccca

SEQ ID NO: 169 - DNA, 57 bp, synthetic construct
  source 1..57: mol_type = other DNA
tgttgatacaaccctaaaatgataattacacccataaatggataattatcaccccca

SEQ ID NO: 170 - DNA, 57 bp, synthetic construct
  source 1..57: mol_type = other DNA
tgttgatacaaccctaaaatgataattacacccataaattcataattatcaccccca

SEQ ID NO: 171 - DNA, 57 bp, synthetic construct
  source 1..57: mol_type = other DNA
tgtcgatacaaccctaaaatgataattacacccataaatggataattatcaccccca

SEQ ID NO: 172 - DNA, 57 bp, synthetic construct
  source 1..57: mol_type = other DNA
tgtcgatacaaccctaaaatgataattacacccataaattcataattatcaccccca

SEQ ID NO: 173 - DNA, 57 bp, synthetic construct
  source 1..57: mol_type = other DNA
tgtggatacaaccctaaaatgataattacacccataaatggataattatcaccccca

SEQ ID NO: 174 - DNA, 57 bp, synthetic construct
  source 1..57: mol_type = other DNA
tgtggatacaaccctaaaatgataattacacccataaattcataattatcaccccca

SEQ ID NO: 175 - DNA, 57 bp, synthetic construct
  source 1..57: mol_type = other DNA
tgttcatacaaccctaaaatgataattacacccataaatggataattatcaccccca

SEQ ID NO: 176 - DNA, 57 bp, synthetic construct
  source 1..57: mol_type = other DNA
tgttcatacaaccctaaaatgataattacacccataaattcataattatcaccccca

SEQ ID NO: 177 - DNA, 57 bp, synthetic construct
  source 1..57: mol_type = other DNA
tgttgatacaaccctaaaatgataattacacccataaattgatcattatcaccccca

SEQ ID NO: 178 - DNA, 57 bp, synthetic construct
  source 1..57: mol_type = other DNA
tgtcgatacaaccctaaaatgataattacacccataaattgatcattatcaccccca

SEQ ID NO: 179 - DNA, 57 bp, synthetic construct
  source 1..57: mol_type = other DNA
tgtggatacaaccctaaaatgataattacacccataaattgatcattatcaccccca

SEQ ID NO: 180 - DNA, 57 bp, synthetic construct
  source 1..57: mol_type = other DNA
tgttcatacaaccctaaaatgataattacacccataaattgatcattatcaccccca

SEQ ID NO: 181 - DNA, 57 bp, synthetic construct
  source 1..57: mol_type = other DNA
tgttgatacaaccctaaaatgataattacacccataaatggatcattatcaccccca

SEQ ID NO: 182 - DNA, 57 bp, synthetic construct
  source 1..57: mol_type = other DNA
tgttgatacaaccctaaaatgataattacacccataaattcatcattatcaccccca

SEQ ID NO: 183 - DNA, 57 bp, synthetic construct
  source 1..57: mol_type = other DNA
tgtcgatacaaccctaaaatgataattacacccataaatggatcattatcaccccca

SEQ ID NO: 184 - DNA, 57 bp, synthetic construct
  source 1..57: mol_type = other DNA
tgtcgatacaaccctaaaatgataattacacccataaattcatcattatcaccccca

SEQ ID NO: 185 - DNA, 57 bp, synthetic construct
  source 1..57: mol_type = other DNA
tgtggatacaaccctaaaatgataattacacccataaatggatcattatcaccccca

SEQ ID NO: 186 - DNA, 57 bp, synthetic construct
  source 1..57: mol_type = other DNA
tgtggatacaaccctaaaatgataattacacccataaattcatcattatcaccccca

SEQ ID NO: 187 - DNA, 57 bp, synthetic construct
  source 1..57: mol_type = other DNA
tgttcatacaaccctaaaatgataattacacccataaatggatcattatcaccccca

SEQ ID NO: 188 - DNA, 57 bp, synthetic construct
  source 1..57: mol_type = other DNA
tgttcatacaaccctaaaatgataattacacccataaattcatcattatcaccccca

SEQ ID NO: 189 - DNA, 57 bp, synthetic construct
  source 1..57: mol_type = other DNA
tgttgatacaaccataaaacgataattacacccataaattgataattatcacaccca

SEQ ID NO: 190 - DNA, 57 bp, synthetic construct
  source 1..57: mol_type = other DNA
tgtcgatacaaccataaaacgataattacacccataaattgataattatcacaccca

SEQ ID NO: 191 - DNA, 57 bp, synthetic construct
  source 1..57: mol_type = other DNA
tgtggatacaaccataaaacgataattacacccataaattgataattatcacaccca

SEQ ID NO: 192 - DNA, 57 bp, synthetic construct
  source 1..57: mol_type = other DNA
tgttcatacaaccataaaacgataattacacccataaattgataattatcacaccca

SEQ ID NO: 193 - DNA, 57 bp, synthetic construct
  source 1..57: mol_type = other DNA
tgttgatacaaccataaaacgataattacacccataaatggataattatcacaccca

SEQ ID NO: 194 - DNA, 57 bp, synthetic construct
  source 1..57: mol_type = other DNA
tgttgatacaaccataaaacgataattacacccataaattcataattatcacaccca

SEQ ID NO: 195 - DNA, 57 bp, synthetic construct
  source 1..57: mol_type = other DNA
tgtcgatacaaccataaaacgataattacacccataaatggataattatcacaccca

SEQ ID NO: 196 - DNA, 57 bp, synthetic construct
  source 1..57: mol_type = other DNA
tgtcgatacaaccataaaacgataattacacccataaattcataattatcacaccca

SEQ ID NO: 197 - DNA, 57 bp, synthetic construct
  source 1..57: mol_type = other DNA
tgtggatacaaccataaaacgataattacacccataaatggataattatcacaccca

SEQ ID NO: 198 - DNA, 57 bp, synthetic construct
  source 1..57: mol_type = other DNA
tgtggatacaaccataaaacgataattacacccataaattcataattatcacaccca

SEQ ID NO: 199 - DNA, 57 bp, synthetic construct
  source 1..57: mol_type = other DNA
tgttcatacaaccataaaacgataattacacccataaatggataattatcacaccca

SEQ ID NO: 200 - DNA, 57 bp, synthetic construct
  source 1..57: mol_type = other DNA
tgttcatacaaccataaaacgataattacacccataaattcataattatcacaccca

SEQ ID NO: 201 - DNA, 57 bp, synthetic construct
  source 1..57: mol_type = other DNA
tgttgatacaaccataaaacgataattacacccataaattgatcattatcacaccca

SEQ ID NO: 202 - DNA, 57 bp, synthetic construct
  source 1..57: mol_type = other DNA
tgtcgatacaaccataaaacgataattacacccataaattgatcattatcacaccca

SEQ ID NO: 203 - DNA, 57 bp, synthetic construct
  source 1..57: mol_type = other DNA
tgtggatacaaccataaaacgataattacacccataaattgatcattatcacaccca

SEQ ID NO: 204 - DNA, 57 bp, synthetic construct
  source 1..57: mol_type = other DNA
tgttcatacaaccataaaacgataattacacccataaattgatcattatcacaccca

SEQ ID NO: 205 - DNA, 57 bp, synthetic construct
  source 1..57: mol_type = other DNA
tgttgatacaaccataaaacgataattacacccataaatggatcattatcacaccca

SEQ ID NO: 206 - DNA, 57 bp, synthetic construct
  source 1..57: mol_type = other DNA
tgttgatacaaccataaaacgataattacacccataaattcatcattatcacaccca

SEQ ID NO: 207 - DNA, 57 bp, synthetic construct
  source 1..57: mol_type = other DNA
tgtcgatacaaccataaaacgataattacacccataaatggatcattatcacaccca

SEQ ID NO: 208 - DNA, 57 bp, synthetic construct
  source 1..57: mol_type = other DNA
tgtcgatacaaccataaaacgataattacacccataaattcatcattatcacaccca

SEQ ID NO: 209 - DNA, 57 bp, synthetic construct; identical to SEQ ID NO: 3
  source 1..57: mol_type = other DNA

SEQ ID NO: 210 - DNA, 57 bp, synthetic construct
  source 1..57: mol_type = other DNA
tgtggatacaaccataaaacgataattacacccataaattcatcattatcacaccca

SEQ ID NO: 211 - DNA, 57 bp, synthetic construct
  source 1..57: mol_type = other DNA
tgttcatacaaccataaaacgataattacacccataaatggatcattatcacaccca

SEQ ID NO: 212 - DNA, 57 bp, synthetic construct
  source 1..57: mol_type = other DNA
tgttcatacaaccataaaacgataattacacccataaattcatcattatcacaccca

SEQ ID NO: 213 - DNA, 57 bp, synthetic construct
  source 1..57: mol_type = other DNA
tgttgatccaaccataaaatgataattacacccataaattgataattatcacaccca

SEQ ID NO: 214 - DNA, 57 bp, synthetic construct
  source 1..57: mol_type = other DNA
tgtcgatccaaccataaaatgataattacacccataaattgataattatcacaccca

SEQ ID NO: 215 - DNA, 57 bp, synthetic construct
  source 1..57: mol_type = other DNA
tgtggatccaaccataaaatgataattacacccataaattgataattatcacaccca

SEQ ID NO: 216 - DNA, 57 bp, synthetic construct
  source 1..57: mol_type = other DNA
tgttcatccaaccataaaatgataattacacccataaattgataattatcacaccca

SEQ ID NO: 217 - DNA, 57 bp, synthetic construct
  source 1..57: mol_type = other DNA
tgttgatccaaccataaaatgataattacacccataaatggataattatcacaccca

SEQ ID NO: 218 - DNA, 57 bp, synthetic construct
  source 1..57: mol_type = other DNA
tgttgatccaaccataaaatgataattacacccataaattcataattatcacaccca

SEQ ID NO: 219 - DNA, 57 bp, synthetic construct
  source 1..57: mol_type = other DNA
tgtcgatccaaccataaaatgataattacacccataaatggataattatcacaccca

SEQ ID NO: 220 - DNA, 57 bp, synthetic construct
  source 1..57: mol_type = other DNA
tgtcgatccaaccataaaatgataattacacccataaattcataattatcacaccca

SEQ ID NO: 221 - DNA, 57 bp, synthetic construct
  source 1..57: mol_type = other DNA
tgtggatccaaccataaaatgataattacacccataaatggataattatcacaccca

SEQ ID NO: 222 - DNA, 57 bp, synthetic construct
  source 1..57: mol_type = other DNA
tgtggatccaaccataaaatgataattacacccataaattcataattatcacaccca

SEQ ID NO: 223 - DNA, 57 bp, synthetic construct
  source 1..57: mol_type = other DNA
tgttcatccaaccataaaatgataattacacccataaatggataattatcacaccca

SEQ ID NO: 224 - DNA, 57 bp, synthetic construct
  source 1..57: mol_type = other DNA
tgttcatccaaccataaaatgataattacacccataaattcataattatcacaccca

SEQ ID NO: 225 - DNA, 57 bp, synthetic construct
  source 1..57: mol_type = other DNA
tgttgatccaaccataaaatgataattacacccataaattgatcattatcacaccca

SEQ ID NO: 226 - DNA, 57 bp, synthetic construct
  source 1..57: mol_type = other DNA
tgtcgatccaaccataaaatgataattacacccataaattgatcattatcacaccca

SEQ ID NO: 227 - DNA, 57 bp, synthetic construct
  source 1..57: mol_type = other DNA
tgtggatccaaccataaaatgataattacacccataaattgatcattatcacaccca

SEQ ID NO: 228 - DNA, 57 bp, synthetic construct
  source 1..57: mol_type = other DNA
tgttcatccaaccataaaatgataattacacccataaattgatcattatcacaccca

SEQ ID NO: 229 - DNA, 57 bp, synthetic construct
  source 1..57: mol_type = other DNA
tgttgatccaaccataaaatgataattacacccataaatggatcattatcacaccca

SEQ ID NO: 230 - DNA, 57 bp, synthetic construct
  source 1..57: mol_type = other DNA
tgttgatccaaccataaaatgataattacacccataaattcatcattatcacaccca

SEQ ID NO: 231 - DNA, 57 bp, synthetic construct
  source 1..57: mol_type = other DNA
tgtcgatccaaccataaaatgataattacacccataaatggatcattatcacaccca

SEQ ID NO: 232 - DNA, 57 bp, synthetic construct
  source 1..57: mol_type = other DNA
tgtcgatccaaccataaaatgataattacacccataaattcatcattatcacaccca

SEQ ID NO: 233 - DNA, 57 bp, synthetic construct; identical to SEQ ID NO: 4
  source 1..57: mol_type = other DNA

SEQ ID NO: 234 - DNA, 57 bp, synthetic construct
  source 1..57: mol_type = other DNA
tgtggatccaaccataaaatgataattacacccataaattcatcattatcacaccca

SEQ ID NO: 235 - DNA, 57 bp, synthetic construct
  source 1..57: mol_type = other DNA
tgttcatccaaccataaaatgataattacacccataaatggatcattatcacaccca

SEQ ID NO: 236 - DNA, 57 bp, synthetic construct
  source 1..57: mol_type = other DNA
tgttcatccaaccataaaatgataattacacccataaattcatcattatcacaccca

SEQ ID NO: 237 - DNA, 57 bp, synthetic construct
  source 1..57: mol_type = other DNA
tgttgatacaaccataaaatgataattcacccataaattgataattatcacacccca

SEQ ID NO: 238 - DNA, 57 bp, synthetic construct
  source 1..57: mol_type = other DNA
tgttgatacaaccataaaatgataattcacccatcaattgataattatcacacccca

SEQ ID NO: 239 - DNA, 57 bp, synthetic construct
  source 1..57: mol_type = other DNA
tgttcatacaaccataaaatgataattcacccataaattgataattatcacacccca

SEQ ID NO: 240 - DNA, 57 bp, synthetic construct
  source 1..57: mol_type = other DNA
tgttcatacaaccataaaatgataattcacccatcaattgataattatcacacccca

SEQ ID NO: 241 - DNA, 57 bp, synthetic construct
  source 1..57: mol_type = other DNA
tgtggatacaaccataaaatgataattcacccataaattgataattatcacacccca

SEQ ID NO: 242 - DNA, 57 bp, synthetic construct
  source 1..57: mol_type = other DNA
tgtggatacaaccataaaatgataattcacccatcaattgataattatcacacccca

SEQ ID NO: 243 - DNA, 57 bp, synthetic construct
  source 1..57: mol_type = other DNA
tgtcgatacaaccataaaatgataattcacccataaattgataattatcacacccca

SEQ ID NO: 244 - DNA, 57 bp, synthetic construct
  source 1..57: mol_type = other DNA
tgtcgatacaaccataaaatgataattcacccatcaattgataattatcacacccca

SEQ ID NO: 245 - DNA, 57 bp, synthetic construct
  source 1..57: mol_type = other DNA
tgttgatacaaccataaaatgataattaccacccataaattgataattatcacaccc

SEQ ID NO: 246 - DNA, 57 bp, synthetic construct
  source 1..57: mol_type = other DNA
tgttgatacaaccataaaatgataattaccacccctaaattgataattatcacaccc

SEQ ID NO: 247 - DNA, 57 bp, synthetic construct
  source 1..57: mol_type = other DNA
tgttgatacaaccataaaatgataattaccacccatacattgataattatcacaccc

SEQ ID NO: 248 - DNA, 57 bp, synthetic construct
  source 1..57: mol_type = other DNA
tgttgatacaaccataaaatgataattaccacccctacattgataattatcacaccc

SEQ ID NO: 249 - DNA, 57 bp, synthetic construct
  source 1..57: mol_type = other DNA
tgttcatacaaccataaaatgataattaccacccataaattgataattatcacaccc

SEQ ID NO: 250 - DNA, 57 bp, synthetic construct
  source 1..57: mol_type = other DNA
tgttcatacaaccataaaatgataattaccacccctaaattgataattatcacaccc

SEQ ID NO: 251 - DNA, 57 bp, synthetic construct
  source 1..57: mol_type = other DNA
tgttcatacaaccataaaatgataattaccacccatacattgataattatcacaccc

SEQ ID NO: 252 - DNA, 57 bp, synthetic construct
  source 1..57: mol_type = other DNA
tgttcatacaaccataaaatgataattaccacccctacattgataattatcacaccc

SEQ ID NO: 253 - DNA, 57 bp, synthetic construct
  source 1..57: mol_type = other DNA
tgtggatacaaccataaaatgataattaccacccataaattgataattatcacaccc

SEQ ID NO: 254 - DNA, 57 bp, synthetic construct
  source 1..57: mol_type = other DNA
tgtggatacaaccataaaatgataattaccacccctaaattgataattatcacaccc

SEQ ID NO: 255 - DNA, 57 bp, synthetic construct
  source 1..57: mol_type = other DNA
tgtggatacaaccataaaatgataattaccacccatacattgataattatcacaccc

SEQ ID NO: 256 - DNA, 57 bp, synthetic construct
  source 1..57: mol_type = other DNA
tgtggatacaaccataaaatgataattaccacccctacattgataattatcacaccc

SEQ ID NO: 257 - DNA, 57 bp, synthetic construct
  source 1..57: mol_type = other DNA
tgtcgatacaaccataaaatgataattaccacccataaattgataattatcacaccc

SEQ ID NO: 258 - DNA, 57 bp, synthetic construct
  source 1..57: mol_type = other DNA
tgtcgatacaaccataaaatgataattaccacccctaaattgataattatcacaccc

SEQ ID NO: 259 - DNA, 57 bp, synthetic construct
  source 1..57: mol_type = other DNA
tgtcgatacaaccataaaatgataattaccacccatacattgataattatcacaccc

SEQ ID NO: 260 - DNA, 57 bp, synthetic construct
  source 1..57: mol_type = other DNA
tgtcgatacaaccataaaatgataattaccacccctacattgataattatcacaccc

SEQ ID NO: 261 - DNA, 57 bp, synthetic construct; identical to SEQ ID NO: 1
  source 1..57: mol_type = other DNA

SEQ ID NO: 262 - DNA, 57 bp, synthetic construct; identical to SEQ ID NO: 69
  source 1..57: mol_type = other DNA

SEQ ID NO: 263 - DNA, 57 bp, synthetic construct; identical to SEQ ID NO: 23
  source 1..57: mol_type = other DNA

SEQ ID NO: 264 - DNA, 57 bp, synthetic construct
  source 1..57: mol_type = other DNA
tgtttatacaaccataaaatgataattacacccataaattgataattatcacaccca

SEQ ID NO: 265 - DNA, 57 bp, synthetic construct; identical to SEQ ID NO: 24
  source 1..57: mol_type = other DNA

SEQ ID NO: 266 - DNA, 57 bp, synthetic construct
  source 1..57: mol_type = other DNA
tgttgaaacaaccataaaatgataattacacccataaattgataattatcacaccca

SEQ ID NO: 267 - DNA, 57 bp, synthetic construct; identical to SEQ ID NO: 213
  source 1..57: mol_type = other DNA

SEQ ID NO: 268 - DNA, 57 bp, synthetic construct
  source 1..57: mol_type = other DNA
tgttgatacatccataaaatgataattacacccataaattgataattatcacaccca

SEQ ID NO: 269 - DNA, 57 bp, synthetic construct
  source 1..57: mol_type = other DNA
tgttgatacacccataaaatgataattacacccataaattgataattatcacaccca

SEQ ID NO: 270 - DNA, 57 bp, synthetic construct
  source 1..57: mol_type = other DNA
tgttgatacagccataaaatgataattacacccataaattgataattatcacaccca

SEQ ID NO: 271 - DNA, 57 bp, synthetic construct
  source 1..57: mol_type = other DNA
tgttgatacaacaataaaatgataattacacccataaattgataattatcacaccca

SEQ ID NO: 272 - DNA, 57 bp, synthetic construct
  source 1..57: mol_type = other DNA
tgttgatacaaccttaaaatgataattacacccataaattgataattatcacaccca

SEQ ID NO: 273 - DNA, 57 bp, synthetic construct; identical to SEQ ID NO: 117
  source 1..57: mol_type = other DNA

SEQ ID NO: 274 - DNA, 57 bp, synthetic construct
  source 1..57: mol_type = other DNA
tgttgatacaaccaaaaaatgataattacacccataaattgataattatcacaccca

SEQ ID NO: 275 - DNA, 57 bp, synthetic construct
  source 1..57: mol_type = other DNA
tgttgatacaaccagaaaatgataattacacccataaattgataattatcacaccca

SEQ ID NO: 276 - DNA, 57 bp, synthetic construct
  source 1..57: mol_type = other DNA
tgttgatacaaccatataatgataattacacccataaattgataattatcacaccca

SEQ ID NO: 277 - DNA, 57 bp, synthetic construct
  source 1..57: mol_type = other DNA
tgttgatacaaccatacaatgataattacacccataaattgataattatcacaccca

SEQ ID NO: 278 - DNA, 57 bp, synthetic construct
  source 1..57: mol_type = other DNA
tgttgatacaaccataaattgataattacacccataaattgataattatcacaccca

SEQ ID NO: 279 - DNA, 57 bp, synthetic construct
  source 1..57: mol_type = other DNA
tgttgatacaaccataaactgataattacacccataaattgataattatcacaccca

SEQ ID NO: 280 - DNA, 57 bp, synthetic construct
  source 1..57: mol_type = other DNA
tgttgatacaaccataaagtgataattacacccataaattgataattatcacaccca

SEQ ID NO: 281 - DNA, 57 bp, synthetic construct; identical to SEQ ID NO: 189
  source 1..57: mol_type = other DNA

SEQ ID NO: 282 - DNA, 57 bp, synthetic construct
  source 1..57: mol_type = other DNA
tgttgatacaaccataaaattataattacacccataaattgataattatcacaccca

SEQ ID NO: 283 - DNA, 57 bp, synthetic construct
  source 1..57: mol_type = other DNA
tgttgatacaaccataaaatcataattacacccataaattgataattatcacaccca

SEQ ID NO: 284 - DNA, 57 bp, synthetic construct
  source 1..57: mol_type = other DNA
tgttgatacaaccataaaataataattacacccataaattgataattatcacaccca

SEQ ID NO: 285 - DNA, 57 bp, synthetic construct
  source 1..57: mol_type = other DNA
tgttgatacaaccataaaatgataattacacccataatttgataattatcacaccca

SEQ ID NO: 286 - DNA, 57 bp, synthetic construct
  source 1..57: mol_type = other DNA
tgttgatacaaccataaaatgataattacacccataacttgataattatcacaccca

SEQ ID NO: 287 - DNA, 57 bp, synthetic construct
  source 1..57: mol_type = other DNA
tgttgatacaaccataaaatgataattacacccataagttgataattatcacaccca

SEQ ID NO: 288 - DNA, 57 bp, synthetic construct; identical to SEQ ID NO: 25
  source 1..57: mol_type = other DNA

SEQ ID NO: 289 - DNA, 57 bp, synthetic construct
  source 1..57: mol_type = other DNA
tgttgatacaaccataaaatgataattacacccataaatttataattatcacaccca

SEQ ID NO: 290 - DNA, 57 bp, synthetic construct; identical to SEQ ID NO: 26
  source 1..57: mol_type = other DNA

SEQ ID NO: 291 - DNA, 57 bp, synthetic construct
  source 1..57: mol_type = other DNA
tgttgatacaaccataaaatgataattacacccataaattgacaattatcacaccca

SEQ ID NO: 292 - DNA, 57 bp, synthetic construct
  source 1..57: mol_type = other DNA
tgttgatacaaccataaaatgataattacacccataaattgattattatcacaccca

SEQ ID NO: 293 - DNA, 57 bp, synthetic construct; identical to SEQ ID NO: 33
  source 1..57: mol_type = other DNA

SEQ ID NO: 294 - DNA, 57 bp, synthetic construct
  source 1..57: mol_type = other DNA
tgttgatacaaccataaaatgataattacacccataaattgataattatcaaaccca

SEQ ID NO: 295 - DNA, 57 bp, synthetic construct
  source 1..57: mol_type = other DNA
tgttgatacaaccataaaatgataattacacccataaattgataattatcactccca

SEQ ID NO: 296 - DNA, 57 bp, synthetic construct; identical to SEQ ID NO: 141
  source 1..57: mol_type = other DNA

SEQ ID NO: 297 - DNA, 57 bp, synthetic construct; identical to SEQ ID NO: 29
  source 1..57: mol_type = other DNA

SEQ ID NO: 298 - DNA, 57 bp, synthetic construct
  source 1..57: mol_type = other DNA
tgtggatacaaccataaaatgataattacacccataaatttataattatcacaccca

SEQ ID NO: 299 - DNA, 57 bp, synthetic construct; identical to SEQ ID NO: 30
  source 1..57: mol_type = other DNA

SEQ ID NO: 300 - DNA, 57 bp, synthetic construct
  source 1..57: mol_type = other DNA
tgtttatacaaccataaaatgataattacacccataaatggataattatcacaccca

SEQ ID NO: 301 - DNA, 57 bp, synthetic construct
  source 1..57: mol_type = other DNA
tgtttatacaaccataaaatgataattacacccataaatttataattatcacaccca

SEQ ID NO: 302 - DNA, 57 bp, synthetic construct
  source 1..57: mol_type = other DNA
tgtttatacaaccataaaatgataattacacccataaattcataattatcacaccca

SEQ ID NO: 303 - DNA, 57 bp, synthetic construct
  source 1..57: mol_type = other DNA
tgttgatacaaccataaaatgataattacacccataaatggattattatcacaccca

SEQ ID NO: 304 - DNA, 57 bp, synthetic construct
  source 1..57: mol_type = other DNA
tgttgatacaaccataaaatgataattacacccataaatttattattatcacaccca

SEQ ID NO: 305 - DNA, 57 bp, synthetic construct
  source 1..57: mol_type = other DNA
tgttgatacaaccataaaatgataattacacccataaattcattattatcacaccca

SEQ ID NO: 306 - DNA, 57 bp, synthetic construct
  source 1..57: mol_type = other DNA
tgtggatacaaccataaaatgataattacacccataaatggattattatcacaccca

SEQ ID NO: 307 - DNA, 57 bp, synthetic construct
  source 1..57: mol_type = other DNA
tgtggatacaaccataaaatgataattacacccataaatttattattatcacaccca

SEQ ID NO: 308 - DNA, 57 bp, synthetic construct
  source 1..57: mol_type = other DNA
tgtggatacaaccataaaatgataattacacccataaattcattattatcacaccca

SEQ ID NO: 309 - DNA, 57 bp, synthetic construct
  source 1..57: mol_type = other DNA
tgtttatacaaccataaaatgataattacacccataaatggattattatcacaccca

SEQ ID NO: 310 - DNA, 57 bp, synthetic construct
  source 1..57: mol_type = other DNA
tgtttatacaaccataaaatgataattacacccataaatttattattatcacaccca

SEQ ID NO: 311 - DNA, 57 bp, synthetic construct
  source 1..57: mol_type = other DNA
tgtttatacaaccataaaatgataattacacccataaattcattattatcacaccca

SEQ ID NO: 312 - DNA, 57 bp, synthetic construct; identical to SEQ ID NO: 1
  source 1..57: mol_type = other DNA

SEQ ID NO: 313 - DNA, 57 bp, synthetic construct; identical to SEQ ID NO: 1
  source 1..57: mol_type = other DNA

SEQ ID NO: 314 - DNA, 57 bp, synthetic construct; identical to SEQ ID NO: 1
  source 1..57: mol_type = other DNA

SEQ ID NO: 315 - DNA, 57 bp, synthetic construct; identical to SEQ ID NO: 1
  source 1..57: mol_type = other DNA

SEQ ID NO: 316 - DNA, 57 bp, synthetic construct
  source 1..57: mol_type = other DNA
tgttgatacaaccataaaaggataattacacccataaattgataattatcacaccca

SEQ ID NO: 317 - DNA, 57 bp, synthetic construct; identical to SEQ ID NO: 283
  source 1..57: mol_type = other DNA

SEQ ID NO: 318 - DNA, 57 bp, synthetic construct
  source 1..57: mol_type = other DNA
tgttgatacaaccataaaatgatcattacacccataaattgataattatcacaccca

SEQ ID NO: 319 - DNA, 57 bp, synthetic construct
  source 1..57: mol_type = other DNA
tgttgatacaaccataaaaggatcattacacccataaattgataattatcacaccca

SEQ ID NO: 320 - DNA, 57 bp, synthetic construct
  source 1..57: mol_type = other DNA
tgttgatacaaccataaaatcatcattacacccataaattgataattatcacaccca

SEQ ID NO: 321 - DNA, 57 bp, synthetic construct
  source 1..57: mol_type = other DNA
tgttgatacaaccataaaatgataattacacccatcaattgataattatcacaccca

SEQ ID NO: 322 - DNA, 57 bp, synthetic construct
  source 1..57: mol_type = other DNA
tgttgatacaaccataaaaggataattacacccatcaattgataattatcacaccca

SEQ ID NO: 323 - DNA, 57 bp, synthetic construct
  source 1..57: mol_type = other DNA
tgttgatacaaccataaaatcataattacacccatcaattgataattatcacaccca

SEQ ID NO: 324 - DNA, 57 bp, synthetic construct
  source 1..57: mol_type = other DNA
tgttgatacaaccataaaatgatcattacacccatcaattgataattatcacaccca

SEQ ID NO: 325 - DNA, 57 bp, synthetic construct
  source 1..57: mol_type = other DNA
tgttgatacaaccataaaaggatcattacacccatcaattgataattatcacaccca

SEQ ID NO: 326 - DNA, 57 bp, synthetic construct
  source 1..57: mol_type = other DNA
tgttgatacaaccataaaatcatcattacacccatcaattgataattatcacaccca

SEQ ID NO: 327 - DNA, 57 bp, synthetic construct
  source 1..57: mol_type = other DNA
tgttgatacaaccataaaatgataattacccccataaattgataattatcacaccca

SEQ ID NO: 328 - DNA, 57 bp, synthetic construct
  source 1..57: mol_type = other DNA
tgttgatacaaccataaaaggataattacccccataaattgataattatcacaccca

SEQ ID NO: 329 - DNA, 57 bp, synthetic construct
  source 1..57: mol_type = other DNA
tgttgatacaaccataaaatcataattacccccataaattgataattatcacaccca

SEQ ID NO: 330 - DNA, 57 bp, synthetic construct
  source 1..57: mol_type = other DNA
tgttgatacaaccataaaatgatcattacccccataaattgataattatcacaccca

SEQ ID NO: 331 - DNA, 57 bp, synthetic construct
  source 1..57: mol_type = other DNA
tgttgatacaaccataaaaggatcattacccccataaattgataattatcacaccca

SEQ ID NO: 332 - DNA, 57 bp, synthetic construct
  source 1..57: mol_type = other DNA
tgttgatacaaccataaaatcatcattacccccataaattgataattatcacaccca

SEQ ID NO: 333 - DNA, 57 bp, synthetic construct
  source 1..57: mol_type = other DNA
tgttgatacaaccataaaatgataattacccccatcaattgataattatcacaccca

SEQ ID NO: 334 - DNA, 57 bp, synthetic construct
  source 1..57: mol_type = other DNA
tgttgatacaaccataaaaggataattacccccatcaattgataattatcacaccca

SEQ ID NO: 335 - DNA, 57 bp, synthetic construct
  source 1..57: mol_type = other DNA
tgttgatacaaccataaaatcataattacccccatcaattgataattatcacaccca

SEQ ID NO: 336 - DNA, 57 bp, synthetic construct
  source 1..57: mol_type = other DNA
tgttgatacaaccataaaatgatcattacccccatcaattgataattatcacaccca

SEQ ID NO: 337 - DNA, 57 bp, synthetic construct
  source 1..57: mol_type = other DNA
tgttgatacaaccataaaaggatcattacccccatcaattgataattatcacaccca

SEQ ID NO: 338 - DNA, 57 bp, synthetic construct
  source 1..57: mol_type = other DNA
tgttgatacaaccataaaatcatcattacccccatcaattgataattatcacaccca

SEQ ID NO: 339 - DNA, 57 bp, synthetic construct
  source 1..57: mol_type = other DNA
tgttgatacaaccataaaatgataattacacccataaattgataattatcccaccca

SEQ ID NO: 340 - DNA, 57 bp, synthetic construct
  source 1..57: mol_type = other DNA
tgttgatacaaccataaaaggataattacacccataaattgataattatcccaccca

SEQ ID NO: 341 - DNA, 57 bp, synthetic construct
  source 1..57: mol_type = other DNA
tgttgatacaaccataaaatcataattacacccataaattgataattatcccaccca

SEQ ID NO: 342 - DNA, 57 bp, synthetic construct
  source 1..57: mol_type = other DNA
tgttgatacaaccataaaatgatcattacacccataaattgataattatcccaccca

SEQ ID NO: 343 - DNA, 57 bp, synthetic construct
  source 1..57: mol_type = other DNA
tgttgatacaaccataaaaggatcattacacccataaattgataattatcccaccca

SEQ ID NO: 344 - DNA, 57 bp, synthetic construct
  source 1..57: mol_type = other DNA
tgttgatacaaccataaaatcatcattacacccataaattgataattatcccaccca

SEQ ID NO: 345 - DNA, 57 bp, synthetic construct
  source 1..57: mol_type = other DNA
tgttgatacaaccataaaatgataattacacccatcaattgataattatcccaccca

SEQ ID NO: 346 - DNA, 57 bp, synthetic construct
  source 1..57: mol_type = other DNA
tgttgatacaaccataaaaggataattacacccatcaattgataattatcccaccca

SEQ ID NO: 347 - DNA, 57 bp, synthetic construct
  source 1..57: mol_type = other DNA
tgttgatacaaccataaaatcataattacacccatcaattgataattatcccaccca

SEQ ID NO: 348 - DNA, 57 bp, synthetic construct
  source 1..57: mol_type = other DNA
tgttgatacaaccataaaatgatcattacacccatcaattgataattatcccaccca

SEQ ID NO: 349 - DNA, 57 bp, synthetic construct
  source 1..57: mol_type = other DNA
tgttgatacaaccataaaaggatcattacacccatcaattgataattatcccaccca

SEQ ID NO: 350 - DNA, 57 bp, synthetic construct
  source 1..57: mol_type = other DNA
tgttgatacaaccataaaatcatcattacacccatcaattgataattatcccaccca

SEQ ID NO: 351 - DNA, 57 bp, synthetic construct
  source 1..57: mol_type = other DNA
tgttgatacaaccataaaatgataattacacccataaattgataattatcacacccc

SEQ ID NO: 352 - DNA, 57 bp, synthetic construct
  source 1..57: mol_type = other DNA
tgttgatacaaccataaaaggataattacacccataaattgataattatcacacccc

SEQ ID NO: 353 - DNA, 57 bp, synthetic construct
  source 1..57: mol_type = other DNA
tgttgatacaaccataaaatcataattacacccataaattgataattatcacacccc

SEQ ID NO: 354 - DNA, 57 bp, synthetic construct
  source 1..57: mol_type = other DNA
tgttgatacaaccataaaatgatcattacacccataaattgataattatcacacccc

SEQ ID NO: 355 - DNA, 57 bp, synthetic construct
  source 1..57: mol_type = other DNA
tgttgatacaaccataaaaggatcattacacccataaattgataattatcacacccc

SEQ ID NO: 356 - DNA, 57 bp, synthetic construct
  source 1..57: mol_type = other DNA
tgttgatacaaccataaaatcatcattacacccataaattgataattatcacacccc

SEQ ID NO: 357 - DNA, 57 bp, synthetic construct
  source 1..57: mol_type = other DNA
tgttgatacaaccataaaatgataattacacccatcaattgataattatcacacccc

SEQ ID NO: 358 - DNA, 57 bp, synthetic construct
  source 1..57: mol_type = other DNA
tgttgatacaaccataaaaggataattacacccatcaattgataattatcacacccc

SEQ ID NO: 359 - DNA, 57 bp, synthetic construct
  source 1..57: mol_type = other DNA
tgttgatacaaccataaaatcataattacacccatcaattgataattatcacacccc

SEQ ID NO: 360 - DNA, 57 bp, synthetic construct
  source 1..57: mol_type = other DNA
tgttgatacaaccataaaatgatcattacacccatcaattgataattatcacacccc

SEQ ID NO: 361 - DNA, 57 bp, synthetic construct
  source 1..57: mol_type = other DNA
tgttgatacaaccataaaaggatcattacacccatcaattgataattatcacacccc

SEQ ID NO: 362 - DNA, 57 bp, synthetic construct
  source 1..57: mol_type = other DNA
tgttgatacaaccataaaatcatcattacacccatcaattgataattatcacacccc

SEQ ID NO: 363 - DNA, 57 bp, synthetic construct
  source 1..57: mol_type = other DNA
tgttgatacaaccataaaatgataattacccccataaattgataattatcccaccca

SEQ ID NO: 364 - DNA, 57 bp, synthetic construct
  source 1..57: mol_type = other DNA
tgttgatacaaccataaaaggataattacccccataaattgataattatcccaccca

SEQ ID NO: 365 - DNA, 57 bp, synthetic construct
  source 1..57: mol_type = other DNA
tgttgatacaaccataaaatcataattacccccataaattgataattatcccaccca

SEQ ID NO: 366 - DNA, 57 bp, synthetic construct
  source 1..57: mol_type = other DNA
tgttgatacaaccataaaatgatcattacccccataaattgataattatcccaccca

SEQ ID NO: 367 - DNA, 57 bp, synthetic construct
  source 1..57: mol_type = other DNA
tgttgatacaaccataaaaggatcattacccccataaattgataattatcccaccca

SEQ ID NO: 368 - DNA, 57 bp, synthetic construct
  source 1..57: mol_type = other DNA
tgttgatacaaccataaaatcatcattacccccataaattgataattatcccaccca

SEQ ID NO: 369 - DNA, 57 bp, synthetic construct
  source 1..57: mol_type = other DNA
tgttgatacaaccataaaatgataattacccccatcaattgataattatcccaccca

SEQ ID NO: 370 - DNA, 57 bp, synthetic construct
  source 1..57: mol_type = other DNA
tgttgatacaaccataaaaggataattacccccatcaattgataattatcccaccca

SEQ ID NO: 371 - DNA, 57 bp, synthetic construct
  source 1..57: mol_type = other DNA
tgttgatacaaccataaaatcataattacccccatcaattgataattatcccaccca

SEQ ID NO: 372 - DNA, 57 bp, synthetic construct
  source 1..57: mol_type = other DNA
tgttgatacaaccataaaatgatcattacccccatcaattgataattatcccaccca

SEQ ID NO: 373 - DNA, 57 bp, synthetic construct
  source 1..57: mol_type = other DNA
tgttgatacaaccataaaaggatcattacccccatcaattgataattatcccaccca

SEQ ID NO: 374 - DNA, 57 bp, synthetic construct
  source 1..57: mol_type = other DNA
tgttgatacaaccataaaatcatcattacccccatcaattgataattatcccaccca

SEQ ID NO: 375 - DNA, 57 bp, synthetic construct
  source 1..57: mol_type = other DNA
tgttgatacaaccataaaatgataattacccccataaattgataattatcacacccc

SEQ ID NO: 376 - DNA, 57 bp, synthetic construct
  source 1..57: mol_type = other DNA
tgttgatacaaccataaaaggataattacccccataaattgataattatcacacccc

SEQ ID NO: 377 - DNA, 57 bp, synthetic construct
  source 1..57: mol_type = other DNA
tgttgatacaaccataaaatcataattacccccataaattgataattatcacacccc

SEQ ID NO: 378 - DNA, 57 bp, synthetic construct
  source 1..57: mol_type = other DNA
tgttgatacaaccataaaatgatcattacccccataaattgataattatcacacccc

SEQ ID NO: 379 - DNA, 57 bp, synthetic construct
  source 1..57: mol_type = other DNA
tgttgatacaaccataaaaggatcattacccccataaattgataattatcacacccc

SEQ ID NO: 380 - DNA, 57 bp, synthetic construct
  source 1..57: mol_type = other DNA
tgttgatacaaccataaaatcatcattacccccataaattgataattatcacacccc

SEQ ID NO: 381 - DNA, 57 bp, synthetic construct
  source 1..57: mol_type = other DNA
tgttgatacaaccataaaatgataattacccccatcaattgataattatcacacccc

SEQ ID NO: 382 - DNA, 57 bp, synthetic construct
  source 1..57: mol_type = other DNA
tgttgatacaaccataaaaggataattacccccatcaattgataattatcacacccc

SEQ ID NO: 383 - DNA, 57 bp, synthetic construct
  source 1..57: mol_type = other DNA
tgttgatacaaccataaaatcataattacccccatcaattgataattatcacacccc

SEQ ID NO: 384 - DNA, 57 bp, synthetic construct
  source 1..57: mol_type = other DNA
tgttgatacaaccataaaatgatcattacccccatcaattgataattatcacacccc

SEQ ID NO: 385 - DNA, 57 bp, synthetic construct
  source 1..57: mol_type = other DNA
tgttgatacaaccataaaaggatcattacccccatcaattgataattatcacacccc

SEQ ID NO: 386 - DNA, 57 bp, synthetic construct
  source 1..57: mol_type = other DNA
tgttgatacaaccataaaatcatcattacccccatcaattgataattatcacacccc

SEQ ID NO: 387 - DNA, 57 bp, synthetic construct
  source 1..57: mol_type = other DNA
tgttgatacaaccataaaatgataattacacccataaattgataattatcccacccc

SEQ ID NO: 388 - DNA, 57 bp, synthetic construct
  source 1..57: mol_type = other DNA
tgttgatacaaccataaaaggataattacacccataaattgataattatcccacccc

SEQ ID NO: 389 - DNA, 57 bp, synthetic construct
  source 1..57: mol_type = other DNA
tgttgatacaaccataaaatcataattacacccataaattgataattatcccacccc

SEQ ID NO: 390 - DNA, 57 bp, synthetic construct
  source 1..57: mol_type = other DNA
tgttgatacaaccataaaatgatcattacacccataaattgataattatcccacccc

SEQ ID NO: 391 - DNA, 57 bp, synthetic construct
  source 1..57: mol_type = other DNA
tgttgatacaaccataaaaggatcattacacccataaattgataattatcccacccc

SEQ ID NO: 392 - DNA, 57 bp, synthetic construct
  source 1..57: mol_type = other DNA
tgttgatacaaccataaaatcatcattacacccataaattgataattatcccacccc

SEQ ID NO: 393 - DNA, 57 bp, synthetic construct
  source 1..57: mol_type = other DNA
tgttgatacaaccataaaatgataattacacccatcaattgataattatcccacccc

SEQ ID NO: 394 - DNA, 57 bp, synthetic construct
  source 1..57: mol_type = other DNA
tgttgatacaaccataaaaggataattacacccatcaattgataattatcccacccc

SEQ ID NO: 395 - DNA, 57 bp, synthetic construct
  source 1..57: mol_type = other DNA
tgttgatacaaccataaaatcataattacacccatcaattgataattatcccacccc

SEQ ID NO: 396 - DNA, 57 bp, synthetic construct
  source 1..57: mol_type = other DNA
tgttgatacaaccataaaatgatcattacacccatcaattgataattatcccacccc

SEQ ID NO: 397 - DNA, 57 bp, synthetic construct
  source 1..57: mol_type = other DNA
tgttgatacaaccataaaaggatcattacacccatcaattgataattatcccacccc

SEQ ID NO: 398 - DNA, 57 bp, synthetic construct
  source 1..57: mol_type = other DNA
tgttgatacaaccataaaatcatcattacacccatcaattgataattatcccacccc

SEQ ID NO: 399 - DNA, 57 bp, synthetic construct
  source 1..57: mol_type = other DNA
tgttgatacaaccataaaatgataattacccccataaattgataattatcccacccc

SEQ ID NO: 400 - DNA, 57 bp, synthetic construct
  source 1..57: mol_type = other DNA
tgttgatacaaccataaaaggataattacccccataaattgataattatcccacccc

SEQ ID NO: 401 - DNA, 57 bp, synthetic construct
  source 1..57: mol_type = other DNA
tgttgatacaaccataaaatcataattacccccataaattgataattatcccacccc

SEQ ID NO: 402 - DNA, 57 bp, synthetic construct
  source 1..57: mol_type = other DNA
tgttgatacaaccataaaatgatcattacccccataaattgataattatcccacccc

SEQ ID NO: 403 - DNA, 57 bp, synthetic construct
  source 1..57: mol_type = other DNA
tgttgatacaaccataaaaggatcattacccccataaattgataattatcccacccc

SEQ ID NO: 404 - DNA, 57 bp, synthetic construct
  source 1..57: mol_type = other DNA
tgttgatacaaccataaaatcatcattacccccataaattgataattatcccacccc

SEQ ID NO: 405 - DNA, 57 bp, synthetic construct
  source 1..57: mol_type = other DNA
tgttgatacaaccataaaatgataattacccccatcaattgataattatcccacccc

SEQ ID NO: 406 - DNA, 57 bp, synthetic construct
  source 1..57: mol_type = other DNA
tgttgatacaaccataaaaggataattacccccatcaattgataattatcccacccc

SEQ ID NO: 407 - DNA, 57 bp, synthetic construct
  source 1..57: mol_type = other DNA
tgttgatacaaccataaaatcataattacccccatcaattgataattatcccacccc

SEQ ID NO: 408 - DNA, 57 bp, synthetic construct
  source 1..57: mol_type = other DNA
tgttgatacaaccataaaatgatcattacccccatcaattgataattatcccacccc

SEQ ID NO: 409 - DNA, 57 bp, synthetic construct
  source 1..57: mol_type = other DNA
tgttgatacaaccataaaaggatcattacccccatcaattgataattatcccacccc

SEQ ID NO: 410 - DNA, 57 bp, synthetic construct
  source 1..57: mol_type = other DNA
tgttgatacaaccataaaatcatcattacccccatcaattgataattatcccacccc

SEQ ID NO: 411 - DNA, 57 bp, synthetic construct
  source 1..57: mol_type = other DNA
tgttgatacaaccataaaatgataattacacccataaattgataattctcacaccca

SEQ ID NO: 412 - DNA, 57 bp, synthetic construct; identical to SEQ ID NO: 316
  source 1..57: mol_type = other DNA

SEQ ID NO: 413 - DNA, 57 bp, synthetic construct; identical to SEQ ID NO: 283
  source 1..57: mol_type = other DNA

SEQ ID NO: 414 - DNA, 57 bp, synthetic construct; identical to SEQ ID NO: 318
  source 1..57: mol_type = other DNA

SEQ ID NO: 415 - DNA, 57 bp, synthetic construct; identical to SEQ ID NO: 319
  source 1..57: mol_type = other DNA

SEQ ID NO: 416 - DNA, 57 bp, synthetic construct; identical to SEQ ID NO: 320
  source 1..57: mol_type = other DNA

SEQ ID NO: 417 - DNA, 57 bp, synthetic construct; identical to SEQ ID NO: 321
  source 1..57: mol_type = other DNA

SEQ ID NO: 418 - DNA, 57 bp, synthetic construct; identical to SEQ ID NO: 322
  source 1..57: mol_type = other DNA

SEQ ID NO: 419 - DNA, 57 bp, synthetic construct; identical to SEQ ID NO: 323
  source 1..57: mol_type = other DNA

SEQ ID NO: 420 - DNA, 57 bp, synthetic construct; identical to SEQ ID NO: 324
  source 1..57: mol_type = other DNA

SEQ ID NO: 421 - DNA, 57 bp, synthetic construct; identical to SEQ ID NO: 325
  source 1..57: mol_type = other DNA

SEQ ID NO: 422 - DNA, 57 bp, synthetic construct; identical to SEQ ID NO: 326
  source 1..57: mol_type = other DNA

SEQ ID NO: 423 - DNA, 57 bp, synthetic construct; identical to SEQ ID NO: 327
  source 1..57: mol_type = other DNA

SEQ ID NO: 424 - DNA, 57 bp, synthetic construct; identical to SEQ ID NO: 328
  source 1..57: mol_type = other DNA

SEQ ID NO: 425 - DNA, 57 bp, synthetic construct; identical to SEQ ID NO: 329
  source 1..57: mol_type = other DNA

SEQ ID NO: 426 - DNA, 57 bp, synthetic construct; identical to SEQ ID NO: 330
  source 1..57: mol_type = other DNA

SEQ ID NO: 427 - DNA, 57 bp, synthetic construct; identical to SEQ ID NO: 331
  source 1..57: mol_type = other DNA

SEQ ID NO: 428 - DNA, 57 bp, synthetic construct; identical to SEQ ID NO: 332
  source 1..57: mol_type = other DNA

SEQ ID NO: 429 - DNA, 57 bp, synthetic construct; identical to SEQ ID NO: 333
  source 1..57: mol_type = other DNA

SEQ ID NO: 430 - DNA, 57 bp, synthetic construct; identical to SEQ ID NO: 334
  source 1..57: mol_type = other DNA

SEQ ID NO: 431 - DNA, 57 bp, synthetic construct; identical to SEQ ID NO: 335
  source 1..57: mol_type = other DNA

SEQ ID NO: 432 - DNA, 57 bp, synthetic construct; identical to SEQ ID NO: 336
  source 1..57: mol_type = other DNA

SEQ ID NO: 433 - DNA, 57 bp, synthetic construct; identical to SEQ ID NO: 337
  source 1..57: mol_type = other DNA

SEQ ID NO: 434 - DNA, 57 bp, synthetic construct; identical to SEQ ID NO: 338
  source 1..57: mol_type = other DNA

SEQ ID NO: 435 - DNA, 57 bp, synthetic construct; identical to SEQ ID NO: 339
  source 1..57: mol_type = other DNA

SEQ ID NO: 436 - DNA, 57 bp, synthetic construct; identical to SEQ ID NO: 340
  source 1..57: mol_type = other DNA

SEQ ID NO: 437 - DNA, 57 bp, synthetic construct; identical to SEQ ID NO: 341
  source 1..57: mol_type = other DNA

SEQ ID NO: 438 - DNA, 57 bp, synthetic construct; identical to SEQ ID NO: 342
  source 1..57: mol_type = other DNA

SEQ ID NO: 439 - DNA, 57 bp, synthetic construct; identical to SEQ ID NO: 343
  source 1..57: mol_type = other DNA

SEQ ID NO: 440 - DNA, 57 bp, synthetic construct; identical to SEQ ID NO: 344
  source 1..57: mol_type = other DNA

SEQ ID NO: 441 - DNA, 57 bp, synthetic construct; identical to SEQ ID NO: 345
  source 1..57: mol_type = other DNA

SEQ ID NO: 442 - DNA, 57 bp, synthetic construct; identical to SEQ ID NO: 346
  source 1..57: mol_type = other DNA

SEQ ID NO: 443 - DNA, 57 bp, synthetic construct; identical to SEQ ID NO: 347
  source 1..57: mol_type = other DNA

SEQ ID NO: 444 - DNA, 57 bp, synthetic construct; identical to SEQ ID NO: 348
  source 1..57: mol_type = other DNA

SEQ ID NO: 445 - DNA, 57 bp, synthetic construct; identical to SEQ ID NO: 349
  source 1..57: mol_type = other DNA

SEQ ID NO: 446 - DNA, 57 bp, synthetic construct; identical to SEQ ID NO: 350
  source 1..57: mol_type = other DNA

SEQ ID NO: 447 - DNA, 57 bp, synthetic construct; identical to SEQ ID NO: 351
  source 1..57: mol_type = other DNA

SEQ ID NO: 448 - DNA, 57 bp, synthetic construct; identical to SEQ ID NO: 352
  source 1..57: mol_type = other DNA

SEQ ID NO: 449 - DNA, 57 bp, synthetic construct; identical to SEQ ID NO: 353
  source 1..57: mol_type = other DNA

SEQ ID NO: 450 - DNA, 57 bp, synthetic construct; identical to SEQ ID NO: 354
  source 1..57: mol_type = other DNA

SEQ ID NO: 451 - DNA, 57 bp, synthetic construct; identical to SEQ ID NO: 355
  source 1..57: mol_type = other DNA

SEQ ID NO: 452 - DNA, 57 bp, synthetic construct; identical to SEQ ID NO: 356
  source 1..57: mol_type = other DNA

SEQ ID NO: 453 - DNA, 57 bp, synthetic construct; identical to SEQ ID NO: 357
  source 1..57: mol_type = other DNA

SEQ ID NO: 454 - DNA, 57 bp, synthetic construct; identical to SEQ ID NO: 358
  source 1..57: mol_type = other DNA

SEQ ID NO: 455 - DNA, 57 bp, synthetic construct; identical to SEQ ID NO: 359
  source 1..57: mol_type = other DNA

SEQ ID NO: 456 - DNA, 57 bp, synthetic construct; identical to SEQ ID NO: 360
  source 1..57: mol_type = other DNA

SEQ ID NO: 457 - DNA, 57 bp, synthetic construct; identical to SEQ ID NO: 361
  source 1..57: mol_type = other DNA

SEQ ID NO: 458 - DNA, 57 bp, synthetic construct; identical to SEQ ID NO: 362
  source 1..57: mol_type = other DNA

SEQ ID NO: 459 - DNA, 57 bp, synthetic construct; identical to SEQ ID NO: 363
  source 1..57: mol_type = other DNA

SEQ ID NO: 460 - DNA, 57 bp, synthetic construct; identical to SEQ ID NO: 364
  source 1..57: mol_type = other DNA

SEQ ID NO: 461 - DNA, 57 bp, synthetic construct; identical to SEQ ID NO: 365
  source 1..57: mol_type = other DNA

SEQ ID NO: 462 - DNA, 57 bp, synthetic construct; identical to SEQ ID NO: 366
  source 1..57: mol_type = other DNA

SEQ ID NO: 463 - DNA, 57 bp, synthetic construct; identical to SEQ ID NO: 367
  source 1..57: mol_type = other DNA

SEQ ID NO: 464 - DNA, 57 bp, synthetic construct; identical to SEQ ID NO: 368
  source 1..57: mol_type = other DNA

SEQ ID NO: 465 - DNA, 57 bp, synthetic construct; identical to SEQ ID NO: 369
  source 1..57: mol_type = other DNA

SEQ ID NO: 466 - DNA, 57 bp, synthetic construct; identical to SEQ ID NO: 370
  source 1..57: mol_type = other DNA

SEQ ID NO: 467 - DNA, 57 bp, synthetic construct; identical to SEQ ID NO: 371
  source 1..57: mol_type = other DNA

SEQ ID NO: 468 - DNA, 57 bp, synthetic construct; identical to SEQ ID NO: 372
  source 1..57: mol_type = other DNA

SEQ ID NO: 469 - DNA, 57 bp, synthetic construct; identical to SEQ ID NO: 373
  source 1..57: mol_type = other DNA

SEQ ID NO: 470 - DNA, 57 bp, synthetic construct; identical to SEQ ID NO: 374
  source 1..57: mol_type = other DNA

SEQ ID NO: 471 - DNA, 57 bp, synthetic construct; identical to SEQ ID NO: 375
  source 1..57: mol_type = other DNA

SEQ ID NO: 472 - DNA, 57 bp, synthetic construct; identical to SEQ ID NO: 376
  source 1..57: mol_type = other DNA

SEQ ID NO: 473 - DNA, 57 bp, synthetic construct; identical to SEQ ID NO: 377
  source 1..57: mol_type = other DNA

SEQ ID NO: 474 - DNA, 57 bp, synthetic construct; identical to SEQ ID NO: 378
  source 1..57: mol_type = other DNA

SEQ ID NO: 475 - DNA, 57 bp, synthetic construct; identical to SEQ ID NO: 379
  source 1..57: mol_type = other DNA

SEQ ID NO: 476 - DNA, 57 bp, synthetic construct; identical to SEQ ID NO: 380
  source 1..57: mol_type = other DNA

SEQ ID NO: 477 - DNA, 57 bp, synthetic construct; identical to SEQ ID NO: 381
  source 1..57: mol_type = other DNA

SEQ ID NO: 478 - DNA, 57 bp, synthetic construct; identical to SEQ ID NO: 382
  source 1..57: mol_type = other DNA

SEQ ID NO: 479 - DNA, 57 bp, synthetic construct; identical to SEQ ID NO: 383
  source 1..57: mol_type = other DNA

SEQ ID NO: 480 - DNA, 57 bp, synthetic construct; identical to SEQ ID NO: 384
  source 1..57: mol_type = other DNA

SEQ ID NO: 481 - DNA, 57 bp, synthetic construct; identical to SEQ ID NO: 385
  source 1..57: mol_type = other DNA

SEQ ID NO: 482 - DNA, 57 bp, synthetic construct; identical to SEQ ID NO: 386
  source 1..57: mol_type = other DNA

SEQ ID NO: 483 - DNA, 57 bp, synthetic construct; identical to SEQ ID NO: 387
  source 1..57: mol_type = other DNA

SEQ ID NO: 484 - DNA, 57 bp, synthetic construct; identical to SEQ ID NO: 388
  source 1..57: mol_type = other DNA

SEQ ID NO: 485 - DNA, 57 bp, synthetic construct; identical to SEQ ID NO: 389
  source 1..57: mol_type = other DNA

SEQ ID NO: 486 - DNA, 57 bp, synthetic construct; identical to SEQ ID NO: 390
  source 1..57: mol_type = other DNA

SEQ ID NO: 487 - DNA, 57 bp, synthetic construct; identical to SEQ ID NO: 391
  source 1..57: mol_type = other DNA

SEQ ID NO: 488 - DNA, 57 bp, synthetic construct; identical to SEQ ID NO: 392
  source 1..57: mol_type = other DNA

SEQ ID NO: 489 - DNA, 57 bp, synthetic construct; identical to SEQ ID NO: 393
  source 1..57: mol_type = other DNA

SEQ ID NO: 490 - DNA, 57 bp, synthetic construct; identical to SEQ ID NO: 394
  source 1..57: mol_type = other DNA

SEQ ID NO: 491 - DNA, 57 bp, synthetic construct; identical to SEQ ID NO: 395
  source 1..57: mol_type = other DNA

SEQ ID NO: 492 - DNA, 57 bp, synthetic construct; identical to SEQ ID NO: 396
  source 1..57: mol_type = other DNA

SEQ ID NO: 493 - DNA, 57 bp, synthetic construct; identical to SEQ ID NO: 397
  source 1..57: mol_type = other DNA

SEQ ID NO: 494 - DNA, 57 bp, synthetic construct; identical to SEQ ID NO: 398
  source 1..57: mol_type = other DNA

SEQ ID NO: 495 - DNA, 57 bp, synthetic construct; identical to SEQ ID NO: 399
  source 1..57: mol_type = other DNA

SEQ ID NO: 496 - DNA, 57 bp, synthetic construct; identical to SEQ ID NO: 400
  source 1..57: mol_type = other DNA

SEQ ID NO: 497 - DNA, 57 bp, synthetic construct; identical to SEQ ID NO: 401
  source 1..57: mol_type = other DNA

SEQ ID NO: 498 - DNA, 57 bp, synthetic construct; identical to SEQ ID NO: 402
  source 1..57: mol_type = other DNA

SEQ ID NO: 499 - DNA, 57 bp, synthetic construct; identical to SEQ ID NO: 403
  source 1..57: mol_type = other DNA

SEQ ID NO: 500 - DNA, 57 bp, synthetic construct; identical to SEQ ID NO: 404
  source 1..57: mol_type = other DNA

SEQ ID NO: 501 - DNA, 57 bp, synthetic construct; identical to SEQ ID NO: 405
  source 1..57: mol_type = other DNA

SEQ ID NO: 502 - DNA, 57 bp, synthetic construct; identical to SEQ ID NO: 406
  source 1..57: mol_type = other DNA

SEQ ID NO: 503 - DNA, 57 bp, synthetic construct; identical to SEQ ID NO: 407
  source 1..57: mol_type = other DNA

SEQ ID NO: 504 - DNA, 57 bp, synthetic construct; identical to SEQ ID NO: 408
  source 1..57: mol_type = other DNA

SEQ ID NO: 505 - DNA, 57 bp, synthetic construct; identical to SEQ ID NO: 409
  source 1..57: mol_type = other DNA

SEQ ID NO: 506 - DNA, 57 bp, synthetic construct; identical to SEQ ID NO: 410
  source 1..57: mol_type = other DNA

SEQ ID NO: 507 - DNA, 57 bp, synthetic construct
  source 1..57: mol_type = other DNA
tgttgatacaaccataaaatgataattcacccataaattgataattatcacacccac

SEQ ID NO: 508 - DNA, 57 bp, synthetic construct
  source 1..57: mol_type = other DNA
tgttgatacaaccataaaaggataattcacccataaattgataattatcacacccac

SEQ ID NO: 509 - DNA, 57 bp, synthetic construct
  source 1..57: mol_type = other DNA
tgttgatacaaccataaaatcataattcacccataaattgataattatcacacccac

SEQ ID NO: 510 - DNA, 57 bp, synthetic construct
  source 1..57: mol_type = other DNA
tgttgatacaaccataaaatgatcattcacccataaattgataattatcacacccac

SEQ ID NO: 511 - DNA, 57 bp, synthetic construct
  source 1..57: mol_type = other DNA
tgttgatacaaccataaaaggatcattcacccataaattgataattatcacacccac

SEQ ID NO: 512 - DNA, 57 bp, synthetic construct
  source 1..57: mol_type = other DNA
tgttgatacaaccataaaatcatcattcacccataaattgataattatcacacccac

SEQ ID NO: 513 - DNA, 57 bp, synthetic construct
  source 1..57: mol_type = other DNA
tgttgatacaaccataaaatgataattcacccctaaattgataattatcacacccac

SEQ ID NO: 514 - DNA, 57 bp, synthetic construct
  source 1..57: mol_type = other DNA
tgttgatacaaccataaaaggataattcacccctaaattgataattatcacacccac

SEQ ID NO: 515 - DNA, 57 bp, synthetic construct
  source 1..57: mol_type = other DNA
tgttgatacaaccataaaatcataattcacccctaaattgataattatcacacccac

SEQ ID NO: 516 - DNA, 57 bp, synthetic construct
  source 1..57: mol_type = other DNA
tgttgatacaaccataaaatgatcattcacccctaaattgataattatcacacccac

SEQ ID NO: 517 - DNA, 57 bp, synthetic construct
  source 1..57: mol_type = other DNA
tgttgatacaaccataaaaggatcattcacccctaaattgataattatcacacccac

SEQ ID NO: 518 - DNA, 57 bp, synthetic construct
  source 1..57: mol_type = other DNA
tgttgatacaaccataaaatcatcattcacccctaaattgataattatcacacccac

SEQ ID NO: 519 - DNA, 57 bp, synthetic construct; identical to SEQ ID NO: 1
  source 1..57: mol_type = other DNA

SEQ ID NO: 520 - DNA, 57 bp, synthetic construct
  source 1..57: mol_type = other DNA
tgttaatacaaccataaaatgataattacacccataaattgataattatcacaccca

SEQ ID NO: 521 - DNA, 57 bp, synthetic construct
  source 1..57: mol_type = other DNA
tgttgttacaaccataaaatgataattacacccataaattgataattatcacaccca

SEQ ID NO: 522 - DNA, 57 bp, synthetic construct
  source 1..57: mol_type = other DNA
tgttgctacaaccataaaatgataattacacccataaattgataattatcacaccca

SEQ ID NO: 523 - DNA, 57 bp, synthetic construct
  source 1..57: mol_type = other DNA
tgttggtacaaccataaaatgataattacacccataaattgataattatcacaccca

SEQ ID NO: 524 - DNA, 57 bp, synthetic construct; identical to SEQ ID NO: 277
  source 1..57: mol_type = other DNA

SEQ ID NO: 525 - DNA, 57 bp, synthetic construct
  source 1..57: mol_type = other DNA
tgttgatacaaccataatatgataattacacccataaattgataattatcacaccca

SEQ ID NO: 526 - DNA, 57 bp, synthetic construct
  source 1..57: mol_type = other DNA
tgttgatacaaccataacatgataattacacccataaattgataattatcacaccca

SEQ ID NO: 527 - DNA, 57 bp, synthetic construct; identical to SEQ ID NO: 278
  source 1..57: mol_type = other DNA

SEQ ID NO: 528 - DNA, 57 bp, synthetic construct; identical to SEQ ID NO: 279
  source 1..57: mol_type = other DNA

SEQ ID NO: 529 - DNA, 57 bp, synthetic construct; identical to SEQ ID NO: 316
  source 1..57: mol_type = other DNA

SEQ ID NO: 530 - DNA, 57 bp, synthetic construct; identical to SEQ ID NO: 282
  source 1..57: mol_type = other DNA

SEQ ID NO: 531 - DNA, 57 bp, synthetic construct; identical to SEQ ID NO: 283
  source 1..57: mol_type = other DNA

SEQ ID NO: 532 - DNA, 57 bp, synthetic construct
  source 1..57: mol_type = other DNA
tgttgatacaaccataaaatgacaattacacccataaattgataattatcacaccca

SEQ ID NO: 533 - DNA, 57 bp, synthetic construct
  source 1..57: mol_type = other DNA
tgttgatacaaccataaaatgattattacacccataaattgataattatcacaccca

SEQ ID NO: 534 - DNA, 57 bp, synthetic construct; identical to SEQ ID NO: 318
  source 1..57: mol_type = other DNA

SEQ ID NO: 535 - DNA, 57 bp, synthetic construct
  source 1..57: mol_type = other DNA
tgttgatacaaccataaaatgataattaaacccataaattgataattatcacaccca

SEQ ID NO: 536 - DNA, 57 bp, synthetic construct
  source 1..57: mol_type = other DNA
tgttgatacaaccataaaatgataattactcccataaattgataattatcacaccca

SEQ ID NO: 537 - DNA, 57 bp, synthetic construct; identical to SEQ ID NO: 327
  source 1..57: mol_type = other DNA

SEQ ID NO: 538 - DNA, 57 bp, synthetic construct
  source 1..57: mol_type = other DNA
tgttgatacaaccataaaatgataattacaaccataaattgataattatcacaccca

SEQ ID NO: 539 - DNA, 57 bp, synthetic construct
  source 1..57: mol_type = other DNA
tgttgatacaaccataaaatgataattacagccataaattgataattatcacaccca

SEQ ID NO: 540 - DNA, 57 bp, synthetic construct
  source 1..57: mol_type = other DNA
tgttgatacaaccataaaatgataattacacccacaaattgataattatcacaccca

SEQ ID NO: 541 - DNA, 57 bp, synthetic construct
  source 1..57: mol_type = other DNA
tgttgatacaaccataaaatgataattacacccattaattgataattatcacaccca

SEQ ID NO: 542 - DNA, 57 bp, synthetic construct; identical to SEQ ID NO: 321
  source 1..57: mol_type = other DNA

SEQ ID NO: 543 - DNA, 57 bp, synthetic construct
  source 1..57: mol_type = other DNA
tgttgatacaaccataaaatgataattacacccataaattaataattatcacaccca

SEQ ID NO: 544 - DNA, 57 bp, synthetic construct
  source 1..57: mol_type = other DNA
tgttgatacaaccataaaatgataattacacccataaattgttaattatcacaccca

SEQ ID NO: 545 - DNA, 57 bp, synthetic construct
  source 1..57: mol_type = other DNA
tgttgatacaaccataaaatgataattacacccataaattgctaattatcacaccca

SEQ ID NO: 546 - DNA, 57 bp, synthetic construct
  source 1..57: mol_type = other DNA
tgttgatacaaccataaaatgataattacacccataaattggtaattatcacaccca

SEQ ID NO: 547 - DNA, 57 bp, synthetic construct
  source 1..57: mol_type = other DNA
tgttgatacaaccataaaatgataattacacccataaattgatatttatcacaccca

SEQ ID NO: 548 - DNA, 57 bp, synthetic construct
  source 1..57: mol_type = other DNA
tgttgatacaaccataaaatgataattacacccataaattgatacttatcacaccca

SEQ ID NO: 549 - DNA, 57 bp, synthetic construct
  source 1..57: mol_type = other DNA
tgttgatacaaccataaaatgataattacacccataaattgatagttatcacaccca

SEQ ID NO: 550 - DNA, 57 bp, synthetic construct
  source 1..57: mol_type = other DNA
tgttgatacaaccataaaatgataattacacccataaattgataataatcacaccca

SEQ ID NO: 551 - DNA, 57 bp, synthetic construct; identical to SEQ ID NO: 411
  source 1..57: mol_type = other DNA

SEQ ID NO: 552 - DNA, 57 bp, synthetic construct
  source 1..57: mol_type = other DNA
tgttgatacaaccataaaatgataattacacccataaattgataattataacaccca

SEQ ID NO: 553 - DNA, 57 bp, synthetic construct
  source 1..57: mol_type = other DNA
tgttgatacaaccataaaatgataattacacccataaattgataattatctcaccca

SEQ ID NO: 554 - DNA, 57 bp, synthetic construct; identical to SEQ ID NO: 339
  source 1..57: mol_type = other DNA

SEQ ID NO: 555 - DNA, 57 bp, synthetic construct; identical to SEQ ID NO: 294
  source 1..57: mol_type = other DNA

SEQ ID NO: 556 - DNA, 57 bp, synthetic construct
  source 1..57: mol_type = other DNA
tgttgatacaaccataaaatgataattacacccataaattgataattatcagaccca

SEQ ID NO: 557 - DNA, 57 bp, synthetic construct
  source 1..57: mol_type = other DNA
tgttgatacaaccataaaatgattattacacccattaattgataattatcacaccca

SEQ ID NO: 558 - DNA, 57 bp, synthetic construct; identical to SEQ ID NO: 5
  source 1..57: mol_type = other DNA

SEQ ID NO: 559 - DNA, 57 bp, synthetic construct
  source 1..57: mol_type = other DNA
tgttgatacaaccataaaattattattacacccattaattgataattatcacaccca

SEQ ID NO: 560 - DNA, 57 bp, synthetic construct
  source 1..57: mol_type = other DNA
tgttgatacaaccataaaatcattattacacccattaattgataattatcacaccca

SEQ ID NO: 561 - DNA, 57 bp, synthetic construct; identical to SEQ ID NO: 1
  source 1..57: mol_type = other DNA

SEQ ID NO: 562 - DNA, 57 bp, synthetic construct; identical to SEQ ID NO: 1
  source 1..57: mol_type = other DNA

SEQ ID NO: 563 - DNA, 57 bp, synthetic construct; identical to SEQ ID NO: 1
  source 1..57: mol_type = other DNA

SEQ ID NO: 564 - DNA, 57 bp, synthetic construct; identical to SEQ ID NO: 1
  source 1..57: mol_type = other DNA

SEQ ID NO: 565 - DNA, 57 bp, synthetic construct
  source 1..57: mol_type = other DNA
tgttgatacaaccatcaaatgataattacacccataaattgataattatcacaccca

SEQ ID NO: 566 - DNA, 57 bp, synthetic construct
  source 1..57: mol_type = other DNA
tgttgatacaaccataaaatgataattacacccctaaattgataattatcacaccca

SEQ ID NO: 567 - DNA, 57 bp, synthetic construct
  source 1..57: mol_type = other DNA
tgttgatacaaccatcaaatgataattacacccctaaattgataattatcacaccca

SEQ ID NO: 568 - DNA, 57 bp, synthetic construct
  source 1..57: mol_type = other DNA
tgttgatacaaccataaaatgataattccacccataaattgataattatcacaccca

SEQ ID NO: 569 - DNA, 57 bp, synthetic construct
  source 1..57: mol_type = other DNA
tgttgatacaaccatcaaatgataattccacccataaattgataattatcacaccca

SEQ ID NO: 570 - DNA, 57 bp, synthetic construct
  source 1..57: mol_type = other DNA
tgttgatacaaccataaaatgataattccacccctaaattgataattatcacaccca

SEQ ID NO: 571 - DNA, 57 bp, synthetic construct
  source 1..57: mol_type = other DNA
tgttgatacaaccatcaaatgataattccacccctaaattgataattatcacaccca

SEQ ID NO: 572 - DNA, 57 bp, synthetic construct
  source 1..57: mol_type = other DNA
tgttgatacaaccataaaatggtaattacacccataaattgataattatcacaccca

SEQ ID NO: 573 - DNA, 57 bp, synthetic construct; identical to SEQ ID NO: 6
  source 1..57: mol_type = other DNA

SEQ ID NO: 574 - DNA, 57 bp, synthetic construct
  source 1..57: mol_type = other DNA
tgttgatacaaccataaaatggtaattacacccctaaattgataattatcacaccca

SEQ ID NO: 575 - DNA, 57 bp, synthetic construct
  source 1..57: mol_type = other DNA
tgttgatacaaccatcaaatggtaattacacccctaaattgataattatcacaccca

SEQ ID NO: 576 - DNA, 57 bp, synthetic construct
  source 1..57: mol_type = other DNA
tgttgatacaaccataaaatggtaattccacccataaattgataattatcacaccca

SEQ ID NO: 577 - DNA, 57 bp, synthetic construct
  source 1..57: mol_type = other DNA
tgttgatacaaccatcaaatggtaattccacccataaattgataattatcacaccca

SEQ ID NO: 578 - DNA, 57 bp, synthetic construct
  source 1..57: mol_type = other DNA
tgttgatacaaccataaaatggtaattccacccctaaattgataattatcacaccca

SEQ ID NO: 579 - DNA, 57 bp, synthetic construct
  source 1..57: mol_type = other DNA
tgttgatacaaccatcaaatggtaattccacccctaaattgataattatcacaccca

SEQ ID NO: 580 - DNA, 57 bp, synthetic construct
  source 1..57: mol_type = other DNA
tgttgatacaaccataaaatgataattacacccatacattgataattatcacaccca

SEQ ID NO: 581 - DNA, 57 bp, synthetic construct
  source 1..57: mol_type = other DNA
tgttgatacaaccatcaaatgataattacacccatacattgataattatcacaccca

SEQ ID NO: 582 - DNA, 57 bp, synthetic construct
  source 1..57: mol_type = other DNA
tgttgatacaaccataaaatgataattacacccctacattgataattatcacaccca

SEQ ID NO: 583 - DNA, 57 bp, synthetic construct
  source 1..57: mol_type = other DNA
tgttgatacaaccatcaaatgataattacacccctacattgataattatcacaccca

SEQ ID NO: 584 - DNA, 57 bp, synthetic construct
  source 1..57: mol_type = other DNA
tgttgatacaaccataaaatgataattccacccatacattgataattatcacaccca

SEQ ID NO: 585 - DNA, 57 bp, synthetic construct
  source 1..57: mol_type = other DNA
tgttgatacaaccatcaaatgataattccacccatacattgataattatcacaccca

SEQ ID NO: 586 - DNA, 57 bp, synthetic construct
  source 1..57: mol_type = other DNA
tgttgatacaaccataaaatgataattccacccctacattgataattatcacaccca

SEQ ID NO: 587 - DNA, 57 bp, synthetic construct
  source 1..57: mol_type = other DNA
tgttgatacaaccatcaaatgataattccacccctacattgataattatcacaccca

SEQ ID NO: 588 - DNA, 57 bp, synthetic construct
  source 1..57: mol_type = other DNA
tgttgatacaaccataaaatggtaattacacccatacattgataattatcacaccca

SEQ ID NO: 589 - DNA, 57 bp, synthetic construct
  source 1..57: mol_type = other DNA
tgttgatacaaccatcaaatggtaattacacccatacattgataattatcacaccca

SEQ ID NO: 590 - DNA, 57 bp, synthetic construct
  source 1..57: mol_type = other DNA
tgttgatacaaccataaaatggtaattacacccctacattgataattatcacaccca

SEQ ID NO: 591 - DNA, 57 bp, synthetic construct
  source 1..57: mol_type = other DNA
tgttgatacaaccatcaaatggtaattacacccctacattgataattatcacaccca

SEQ ID NO: 592 - DNA, 57 bp, synthetic construct
  source 1..57: mol_type = other DNA
tgttgatacaaccataaaatggtaattccacccatacattgataattatcacaccca

SEQ ID NO: 593 - DNA, 57 bp, synthetic construct
  source 1..57: mol_type = other DNA
tgttgatacaaccatcaaatggtaattccacccatacattgataattatcacaccca

SEQ ID NO: 594 - DNA, 57 bp, synthetic construct
  source 1..57: mol_type = other DNA
tgttgatacaaccataaaatggtaattccacccctacattgataattatcacaccca

SEQ ID NO: 595 - DNA, 57 bp, synthetic construct
  source 1..57: mol_type = other DNA
tgttgatacaaccatcaaatggtaattccacccctacattgataattatcacaccca

SEQ ID NO: 596 - DNA, 57 bp, synthetic construct
  source 1..57: mol_type = other DNA
tgttgataccaccataaaatgataattacacccataaattgataattatcacaccca

SEQ ID NO: 597 - DNA, 57 bp, synthetic construct
  source 1..57: mol_type = other DNA
tgttgataccaccatcaaatgataattacacccataaattgataattatcacaccca

SEQ ID NO: 598 - DNA, 57 bp, synthetic construct
  source 1..57: mol_type = other DNA
tgttgataccaccataaaatgataattacacccctaaattgataattatcacaccca

SEQ ID NO: 599 - DNA, 57 bp, synthetic construct
  source 1..57: mol_type = other DNA
tgttgataccaccatcaaatgataattacacccctaaattgataattatcacaccca

SEQ ID NO: 600 - DNA, 57 bp, synthetic construct
  source 1..57: mol_type = other DNA
tgttgataccaccataaaatgataattccacccataaattgataattatcacaccca

SEQ ID NO: 601 - DNA, 57 bp, synthetic construct
  source 1..57: mol_type = other DNA
tgttgataccaccatcaaatgataattccacccataaattgataattatcacaccca

SEQ ID NO: 602 - DNA, 57 bp, synthetic construct
  source 1..57: mol_type = other DNA
tgttgataccaccataaaatgataattccacccctaaattgataattatcacaccca

SEQ ID NO: 603 - DNA, 57 bp, synthetic construct
  source 1..57: mol_type = other DNA
tgttgataccaccatcaaatgataattccacccctaaattgataattatcacaccca

SEQ ID NO: 604 - DNA, 57 bp, synthetic construct
  source 1..57: mol_type = other DNA
tgttgataccaccataaaatggtaattacacccataaattgataattatcacaccca

SEQ ID NO: 605 - DNA, 57 bp, synthetic construct
  source 1..57: mol_type = other DNA
tgttgataccaccatcaaatggtaattacacccataaattgataattatcacaccca

SEQ ID NO: 606 - DNA, 57 bp, synthetic construct
  source 1..57: mol_type = other DNA
tgttgataccaccataaaatggtaattacacccctaaattgataattatcacaccca

SEQ ID NO: 607 - DNA, 57 bp, synthetic construct
  source 1..57: mol_type = other DNA
tgttgataccaccatcaaatggtaattacacccctaaattgataattatcacaccca

SEQ ID NO: 608 - DNA, 57 bp, synthetic construct
  source 1..57: mol_type = other DNA
tgttgataccaccataaaatggtaattccacccataaattgataattatcacaccca

SEQ ID NO: 609 - DNA, 57 bp, synthetic construct
  source 1..57: mol_type = other DNA
tgttgataccaccatcaaatggtaattccacccataaattgataattatcacaccca

SEQ ID NO: 610 - DNA, 57 bp, synthetic construct
  source 1..57: mol_type = other DNA
tgttgataccaccataaaatggtaattccacccctaaattgataattatcacaccca

SEQ ID NO: 611 - DNA, 57 bp, synthetic construct
  source 1..57: mol_type = other DNA
tgttgataccaccatcaaatggtaattccacccctaaattgataattatcacaccca

SEQ ID NO: 612 - DNA, 57 bp, synthetic construct
  source 1..57: mol_type = other DNA
tgttgataccaccataaaatgataattacacccatacattgataattatcacaccca

SEQ ID NO: 613 - DNA, 57 bp, synthetic construct
  source 1..57: mol_type = other DNA
tgttgataccaccatcaaatgataattacacccatacattgataattatcacaccca

SEQ ID NO: 614 - DNA, 57 bp, synthetic construct
  source 1..57: mol_type = other DNA
tgttgataccaccataaaatgataattacacccctacattgataattatcacaccca

SEQ ID NO: 615 - DNA, 57 bp, synthetic construct
  source 1..57: mol_type = other DNA
tgttgataccaccatcaaatgataattacacccctacattgataattatcacaccca

SEQ ID NO: 616 - DNA, 57 bp, synthetic construct
  source 1..57: mol_type = other DNA
tgttgataccaccataaaatgataattccacccatacattgataattatcacaccca

SEQ ID NO: 617 - DNA, 57 bp, synthetic construct
  source 1..57: mol_type = other DNA
tgttgataccaccatcaaatgataattccacccatacattgataattatcacaccca

SEQ ID NO: 618 - DNA, 57 bp, synthetic construct
  source 1..57: mol_type = other DNA
tgttgataccaccataaaatgataattccacccctacattgataattatcacaccca

SEQ ID NO: 619 - DNA, 57 bp, synthetic construct
  source 1..57: mol_type = other DNA
tgttgataccaccatcaaatgataattccacccctacattgataattatcacaccca

SEQ ID NO: 620 - DNA, 57 bp, synthetic construct
  source 1..57: mol_type = other DNA
tgttgataccaccataaaatggtaattacacccatacattgataattatcacaccca

SEQ ID NO: 621 - DNA, 57 bp, synthetic construct
  source 1..57: mol_type = other DNA
tgttgataccaccatcaaatggtaattacacccatacattgataattatcacaccca

SEQ ID NO: 622 - DNA, 57 bp, synthetic construct
  source 1..57: mol_type = other DNA
tgttgataccaccataaaatggtaattacacccctacattgataattatcacaccca

SEQ ID NO: 623 - DNA, 57 bp, synthetic construct
  source 1..57: mol_type = other DNA
tgttgataccaccatcaaatggtaattacacccctacattgataattatcacaccca

SEQ ID NO: 624 - DNA, 57 bp, synthetic construct
  source 1..57: mol_type = other DNA
tgttgataccaccataaaatggtaattccacccatacattgataattatcacaccca

SEQ ID NO: 625 - DNA, 57 bp, synthetic construct
  source 1..57: mol_type = other DNA
tgttgataccaccatcaaatggtaattccacccatacattgataattatcacaccca

SEQ ID NO: 626 - DNA, 57 bp, synthetic construct
  source 1..57: mol_type = other DNA
tgttgataccaccataaaatggtaattccacccctacattgataattatcacaccca

SEQ ID NO: 627 - DNA, 57 bp, synthetic construct
  source 1..57: mol_type = other DNA
tgttgataccaccatcaaatggtaattccacccctacattgataattatcacaccca

SEQ ID NO: 628 - DNA, 57 bp, synthetic construct; identical to SEQ ID NO: 1
  source 1..57: mol_type = other DNA

SEQ ID NO: 629 - DNA, 57 bp, synthetic construct
  source 1..57: mol_type = other DNA
tgttgatactaccataaaatgataattacacccataaattgataattatcacaccca

SEQ ID NO: 630 - DNA, 57 bp, synthetic construct; identical to SEQ ID NO: 596
  source 1..57: mol_type = other DNA

SEQ ID NO: 631 - DNA, 57 bp, synthetic construct
  source 1..57: mol_type = other DNA
tgttgatacaaccacaaaatgataattacacccataaattgataattatcacaccca

SEQ ID NO: 632 - DNA, 57 bp, synthetic construct
  source 1..57: mol_type = other DNA
tgttgatacaaccattaaatgataattacacccataaattgataattatcacaccca

SEQ ID NO: 633 - DNA, 57 bp, synthetic construct; identical to SEQ ID NO: 565
  source 1..57: mol_type = other DNA

SEQ ID NO: 634 - DNA, 57 bp, synthetic construct; identical to SEQ ID NO: 278
  source 1..57: mol_type = other DNA

SEQ ID NO: 635 - DNA, 57 bp, synthetic construct; identical to SEQ ID NO: 279
  source 1..57: mol_type = other DNA

SEQ ID NO: 636 - DNA, 57 bp, synthetic construct; identical to SEQ ID NO: 280
  source 1..57: mol_type = other DNA

SEQ ID NO: 637 - DNA, 57 bp, synthetic construct; identical to SEQ ID NO: 284
  source 1..57: mol_type = other DNA

SEQ ID NO: 638 - DNA, 57 bp, synthetic construct
  source 1..57: mol_type = other DNA
tgttgatacaaccataaaatgttaattacacccataaattgataattatcacaccca

SEQ ID NO: 639 - DNA, 57 bp, synthetic construct
  source 1..57: mol_type = other DNA
tgttgatacaaccataaaatgctaattacacccataaattgataattatcacaccca

SEQ ID NO: 640 - DNA, 57 bp, synthetic construct; identical to SEQ ID NO: 572
  source 1..57: mol_type = other DNA

SEQ ID NO: 641 - DNA, 57 bp, synthetic construct
  source 1..57: mol_type = other DNA
tgttgatacaaccataaaatgatatttacacccataaattgataattatcacaccca

SEQ ID NO: 642 - DNA, 57 bp, synthetic construct
  source 1..57: mol_type = other DNA
tgttgatacaaccataaaatgatacttacacccataaattgataattatcacaccca

SEQ ID NO: 643 - DNA, 57 bp, synthetic construct
  source 1..57: mol_type = other DNA
tgttgatacaaccataaaatgatagttacacccataaattgataattatcacaccca

SEQ ID NO: 644 - DNA, 57 bp, synthetic construct
  source 1..57: mol_type = other DNA
tgttgatacaaccataaaatgataataacacccataaattgataattatcacaccca

SEQ ID NO: 645 - DNA, 57 bp, synthetic construct; identical to SEQ ID NO: 568
  source 1..57: mol_type = other DNA

SEQ ID NO: 646 - DNA, 57 bp, synthetic construct
  source 1..57: mol_type = other DNA
tgttgatacaaccataaaatgataattacaccaataaattgataattatcacaccca

SEQ ID NO: 647 - DNA, 57 bp, synthetic construct
  source 1..57: mol_type = other DNA
tgttgatacaaccataaaatgataattacacccttaaattgataattatcacaccca

SEQ ID NO: 648 - DNA, 57 bp, synthetic construct; identical to SEQ ID NO: 566
  source 1..57: mol_type = other DNA

SEQ ID NO: 649 - DNA, 57 bp, synthetic construct
  source 1..57: mol_type = other DNA
tgttgatacaaccataaaatgataattacacccaaaaattgataattatcacaccca

SEQ ID NO: 650 - DNA, 57 bp, synthetic construct
  source 1..57: mol_type = other DNA
tgttgatacaaccataaaatgataattacacccagaaattgataattatcacaccca

SEQ ID NO: 651 - DNA, 57 bp, synthetic construct; identical to SEQ ID NO: 321
  source 1..57: mol_type = other DNA

SEQ ID NO: 652 - DNA, 57 bp, synthetic construct
  source 1..57: mol_type = other DNA
tgttgatacaaccataaaatgataattacacccatatattgataattatcacaccca

SEQ ID NO: 653 - DNA, 57 bp, synthetic construct; identical to SEQ ID NO: 580
  source 1..57: mol_type = other DNA

SEQ ID NO: 654 - DNA, 57 bp, synthetic construct; identical to SEQ ID NO: 285
  source 1..57: mol_type = other DNA

SEQ ID NO: 655 - DNA, 57 bp, synthetic construct; identical to SEQ ID NO: 286
  source 1..57: mol_type = other DNA

SEQ ID NO: 656 - DNA, 57 bp, synthetic construct
  source 1..57: mol_type = other DNA
tgttgatacaaccattaaatggtaattacacccataaattgataattatcacaccca

SEQ ID NO: 657 - DNA, 57 bp, synthetic construct
  source 1..57: mol_type = other DNA
tgttgatacaaccattaaatgataattccacccataaattgataattatcacaccca

SEQ ID NO: 658 - DNA, 57 bp, synthetic construct
  source 1..57: mol_type = other DNA
tgttgatacaaccattaaatgataattacacccaaaaattgataattatcacaccca

SEQ ID NO: 659 - DNA, 57 bp, synthetic construct
  source 1..57: mol_type = other DNA
tgttgatacaaccattaaatgataattacacccatatattgataattatcacaccca

SEQ ID NO: 660 - DNA, 57 bp, synthetic construct
  source 1..57: mol_type = other DNA
tgttgatacaaccattaaatgataattacacccataatttgataattatcacaccca

SEQ ID NO: 661 - DNA, 57 bp, synthetic construct
  source 1..57: mol_type = other DNA
tgttgatacaaccattaaataataattccacccataaattgataattatcacaccca

SEQ ID NO: 662 - DNA, 57 bp, synthetic construct
  source 1..57: mol_type = other DNA
tgttgatacaaccattaaatgttaattccacccataaattgataattatcacaccca

SEQ ID NO: 663 - DNA, 57 bp, synthetic construct
  source 1..57: mol_type = other DNA
tgttgatacaaccattaaatgctaattccacccataaattgataattatcacaccca

SEQ ID NO: 664 - DNA, 57 bp, synthetic construct
  source 1..57: mol_type = other DNA
tgttgatacaaccattaaatggtaattccacccataaattgataattatcacaccca

SEQ ID NO: 665 - DNA, 57 bp, synthetic construct
  source 1..57: mol_type = other DNA
tgttgatacaaccattaaatgataattccaccaataaattgataattatcacaccca

SEQ ID NO: 666 - DNA, 57 bp, synthetic construct
  source 1..57: mol_type = other DNA
tgttgatacaaccattaaatgataattccacccttaaattgataattatcacaccca

SEQ ID NO: 667 - DNA, 57 bp, synthetic construct
  source 1..57: mol_type = other DNA
tgttgatacaaccattaaatgataattccacccctaaattgataattatcacaccca

SEQ ID NO: 668 - DNA, 57 bp, synthetic construct
  source 1..57: mol_type = other DNA
tgttgatacaaccattaaatgataattccacccaaaaattgataattatcacaccca

SEQ ID NO: 669 - DNA, 57 bp, synthetic construct
  source 1..57: mol_type = other DNA
tgttgatacaaccattaaatgataattccacccagaaattgataattatcacaccca

SEQ ID NO: 670 - DNA, 57 bp, synthetic construct
  source 1..57: mol_type = other DNA
tgttgatacaaccattaaatgataattccacccatcaattgataattatcacaccca

SEQ ID NO: 671 - DNA, 57 bp, synthetic construct
  source 1..57: mol_type = other DNA
tgttgatacaaccattaaatgataattccacccatatattgataattatcacaccca

SEQ ID NO: 672 - DNA, 57 bp, synthetic construct
  source 1..57: mol_type = other DNA
tgttgatacaaccattaaatgataattccacccatacattgataattatcacaccca

SEQ ID NO: 673 - DNA, 57 bp, synthetic construct; identical to SEQ ID NO: 7
  source 1..57: mol_type = other DNA

SEQ ID NO: 674 - DNA, 57 bp, synthetic construct
  source 1..57: mol_type = other DNA
tgttgatacaaccattaaatgataattccacccataacttgataattatcacaccca

SEQ ID NO: 675 - DNA, 57 bp, synthetic construct; identical to SEQ ID NO: 664
  source 1..57: mol_type = other DNA

SEQ ID NO: 676 - DNA, 57 bp, synthetic construct; identical to SEQ ID NO: 668
  source 1..57: mol_type = other DNA

SEQ ID NO: 677 - DNA, 57 bp, synthetic construct; identical to SEQ ID NO: 671
  source 1..57: mol_type = other DNA

SEQ ID NO: 678 - DNA, 57 bp, synthetic construct
  source 1..57: mol_type = other DNA
tgttgatacaaccattaaatggtaattccacccatatattgataattatcacaccca

SEQ ID NO: 679 - DNA, 57 bp, synthetic construct
  source 1..57: mol_type = other DNA
tgttgatacaaccattaaatgataattccacccaaatattgataattatcacaccca

SEQ ID NO: 680 - DNA, 57 bp, synthetic construct
  source 1..57: mol_type = other DNA
tgttgatacaaccattaaatggtaattccacccaaaaattgataattatcacaccca

SEQ ID NO: 681 - DNA, 57 bp, synthetic construct; identical to SEQ ID NO: 8
  source 1..57: mol_type = other DNA

SEQ ID NO: 682 - DNA, 57 bp, synthetic construct
  source 1..57: mol_type = other DNA
tgggtgtgataattatcaatttatgggtgtaattatcattttatggttgtatcaaca

SEQ ID NO: 683 - DNA, 57 bp, synthetic construct
  source 1..57: mol_type = other DNA
ggggtgtgataattatcaatttatgggtgtaattatcattttatggttgtatcaaca

SEQ ID NO: 684 - DNA, 57 bp, synthetic construct
  source 1..57: mol_type = other DNA
ttggtgtgataattatcaatttatgggtgtaattatcattttatggttgtatcaaca

SEQ ID NO: 685 - DNA, 57 bp, synthetic construct
  source 1..57: mol_type = other DNA
tcggtgtgataattatcaatttatgggtgtaattatcattttatggttgtatcaaca

SEQ ID NO: 686 - DNA, 57 bp, synthetic construct
  source 1..57: mol_type = other DNA
tgggtgggataattatcaatttatgggtgtaattatcattttatggttgtatcaaca

SEQ ID NO: 687 - DNA, 57 bp, synthetic construct
  source 1..57: mol_type = other DNA
tgggtgttataattatcaatttatgggtgtaattatcattttatggttgtatcaaca

SEQ ID NO: 688 - DNA, 57 bp, synthetic construct
  source 1..57: mol_type = other DNA
tgggtgtcataattatcaatttatgggtgtaattatcattttatggttgtatcaaca

SEQ ID NO: 689 - DNA, 57 bp, synthetic construct
  source 1..57: mol_type = other DNA
tgggtgtgacaattatcaatttatgggtgtaattatcattttatggttgtatcaaca

SEQ ID NO: 690 - DNA, 57 bp, synthetic construct
  source 1..57: mol_type = other DNA
tgggtgtgattattatcaatttatgggtgtaattatcattttatggttgtatcaaca

SEQ ID NO: 691 - DNA, 57 bp, synthetic construct
  source 1..57: mol_type = other DNA
tgggtgtgatcattatcaatttatgggtgtaattatcattttatggttgtatcaaca

SEQ ID NO: 692 - DNA, 57 bp, synthetic construct
  source 1..57: mol_type = other DNA
tgggtgtgataattatcaattaatgggtgtaattatcattttatggttgtatcaaca

SEQ ID NO: 693 - DNA, 57 bp, synthetic construct
  source 1..57: mol_type = other DNA
tgggtgtgataattatcaatttctgggtgtaattatcattttatggttgtatcaaca

SEQ ID NO: 694 - DNA, 57 bp, synthetic construct
  source 1..57: mol_type = other DNA
tgggtgtgataattatcaatttatgggagtaattatcattttatggttgtatcaaca

SEQ ID NO: 695 - DNA, 57 bp, synthetic construct
  source 1..57: mol_type = other DNA
tgggtgtgataattatcaatttatgggggtaattatcattttatggttgtatcaaca

SEQ ID NO: 696 - DNA, 57 bp, synthetic construct
  source 1..57: mol_type = other DNA
tgggtgtgataattatcaatttatgggtctaattatcattttatggttgtatcaaca

SEQ ID NO: 697 - DNA, 57 bp, synthetic construct
  source 1..57: mol_type = other DNA
tgggtgtgataattatcaatttatgggtgtatttatcattttatggttgtatcaaca

SEQ ID NO: 698 - DNA, 57 bp, synthetic construct
  source 1..57: mol_type = other DNA
tgggtgtgataattatcaatttatgggtgtacttatcattttatggttgtatcaaca

SEQ ID NO: 699 - DNA, 57 bp, synthetic construct
  source 1..57: mol_type = other DNA
tgggtgtgataattatcaatttatgggtgtagttatcattttatggttgtatcaaca

SEQ ID NO: 700 - DNA, 57 bp, synthetic construct
  source 1..57: mol_type = other DNA
tgggtgtgataattatcaatttatgggtgtaataatcattttatggttgtatcaaca

SEQ ID NO: 701 - DNA, 57 bp, synthetic construct
  source 1..57: mol_type = other DNA
tgggtgtgataattatcaatttatgggtgtaattctcattttatggttgtatcaaca

SEQ ID NO: 702 - DNA, 57 bp, synthetic construct
  source 1..57: mol_type = other DNA
tgggtgtgataattatcaatttatgggtgtaattataattttatggttgtatcaaca

SEQ ID NO: 703 - DNA, 57 bp, synthetic construct
  source 1..57: mol_type = other DNA
tgggtgtgataattatcaatttatgggtgtaattatctttttatggttgtatcaaca

SEQ ID NO: 704 - DNA, 57 bp, synthetic construct
  source 1..57: mol_type = other DNA
tgggtgtgataattatcaatttatgggtgtaattatccttttatggttgtatcaaca

SEQ ID NO: 705 - DNA, 57 bp, synthetic construct
  source 1..57: mol_type = other DNA
tgggtgtgataattatcaatttatgggtgtaattatcaatttatggttgtatcaaca

SEQ ID NO: 706 - DNA, 57 bp, synthetic construct
  source 1..57: mol_type = other DNA
tgggtgtgataattatcaatttatgggtgtaattatcagtttatggttgtatcaaca

SEQ ID NO: 707 - DNA, 57 bp, synthetic construct
  source 1..57: mol_type = other DNA
tgggtgtgataattatcaatttatgggtgtaattatcatcttatggttgtatcaaca

SEQ ID NO: 708 - DNA, 57 bp, synthetic construct
  source 1..57: mol_type = other DNA
tgggtgtgataattatcaatttatgggtgtaattatcatattatggttgtatcaaca

SEQ ID NO: 709 - DNA, 57 bp, synthetic construct
  source 1..57: mol_type = other DNA
tgggtgtgataattatcaatttatgggtgtaattatcatgttatggttgtatcaaca

SEQ ID NO: 710 - DNA, 57 bp, synthetic construct
  source 1..57: mol_type = other DNA
tgggtgtgataattatcaatttatgggtgtaattatcattctatggttgtatcaaca

SEQ ID NO: 711 - DNA, 57 bp, synthetic construct
  source 1..57: mol_type = other DNA
tgggtgtgataattatcaatttatgggtgtaattatcatttaatggttgtatcaaca

SEQ ID NO: 712 - DNA, 57 bp, synthetic construct
  source 1..57: mol_type = other DNA
tgggtgtgataattatcaatttatgggtgtaattatcatttgatggttgtatcaaca

SEQ ID NO: 713 - DNA, 57 bp, synthetic construct
  source 1..57: mol_type = other DNA
tgggtgtgataattatcaatttatgggtgtaattatcattttttggttgtatcaaca

SEQ ID NO: 714 - DNA, 57 bp, synthetic construct
  source 1..57: mol_type = other DNA
tgggtgtgataattatcaatttatgggtgtaattatcattttctggttgtatcaaca

SEQ ID NO: 715 - DNA, 57 bp, synthetic construct
  source 1..57: mol_type = other DNA
tgggtgtgataattatcaatttatgggtgtaattatcattttgtggttgtatcaaca

SEQ ID NO: 716 - DNA, 57 bp, synthetic construct
  source 1..57: mol_type = other DNA
tgggtgtgataattatcaatttatgggtgtaattatcattttacggttgtatcaaca

SEQ ID NO: 717 - DNA, 57 bp, synthetic construct
  source 1..57: mol_type = other DNA
tgggtgtgataattatcaatttatgggtgtaattatcattttattgttgtatcaaca

SEQ ID NO: 718 - DNA, 57 bp, synthetic construct
  source 1..57: mol_type = other DNA
tgggtgtgataattatcaatttatgggtgtaattatcattttatcgttgtatcaaca

SEQ ID NO: 719 - DNA, 57 bp, synthetic construct
  source 1..57: mol_type = other DNA
tgggtgtgataattatcaatttatgggtgtaattatcattttatagttgtatcaaca

SEQ ID NO: 720 - DNA, 57 bp, synthetic construct; identical to SEQ ID NO: 685
  source 1..57: mol_type = other DNA

SEQ ID NO: 721 - DNA, 57 bp, synthetic construct
  source 1..57: mol_type = other DNA
tcggtgtcataattatcaatttatgggtgtaattatcattttatggttgtatcaaca

SEQ ID NO: 722 - DNA, 57 bp, synthetic construct
  source 1..57: mol_type = other DNA
tcggtgtcacaattatcaatttatgggtgtaattatcattttatggttgtatcaaca

SEQ ID NO: 723 - DNA, 57 bp, synthetic construct
  source 1..57: mol_type = other DNA
tcggtgtcattattatcaatttatgggtgtaattatcattttatggttgtatcaaca

SEQ ID NO: 724 - DNA, 57 bp, synthetic construct
  source 1..57: mol_type = other DNA
tcggtgtcatcattatcaatttatgggtgtaattatcattttatggttgtatcaaca

SEQ ID NO: 725 - DNA, 57 bp, synthetic construct
  source 1..57: mol_type = other DNA
tcggtgtcacaattatcaatttatgggtgtaattatcattttttggttgtatcaaca

SEQ ID NO: 726 - DNA, 57 bp, synthetic construct
  source 1..57: mol_type = other DNA
tcggtgtcattattatcaatttatgggtgtaattatcattttttggttgtatcaaca

SEQ ID NO: 727 - DNA, 57 bp, synthetic construct
  source 1..57: mol_type = other DNA
tcggtgtcatcattatcaatttatgggtgtaattatcattttttggttgtatcaaca

SEQ ID NO: 728 - DNA, 57 bp, synthetic construct
  source 1..57: mol_type = other DNA
tcggtgtcacaattatcaatttatgggtgtaattatcatttaatggttgtatcaaca

SEQ ID NO: 729 - DNA, 57 bp, synthetic construct
  source 1..57: mol_type = other DNA
tcggtgtcattattatcaatttatgggtgtaattatcatttaatggttgtatcaaca

SEQ ID NO: 730 - DNA, 57 bp, synthetic construct
  source 1..57: mol_type = other DNA
tcggtgtcatcattatcaatttatgggtgtaattatcatttaatggttgtatcaaca

SEQ ID NO: 731 - DNA, 57 bp, synthetic construct
  source 1..57: mol_type = other DNA
tcggtgtcacaattatcaatttatgggtgtaattatctttttatggttgtatcaaca

SEQ ID NO: 732 - DNA, 57 bp, synthetic construct
  source 1..57: mol_type = other DNA
tcggtgtcattattatcaatttatgggtgtaattatctttttatggttgtatcaaca

SEQ ID NO: 733 - DNA, 57 bp, synthetic construct
  source 1..57: mol_type = other DNA
tcggtgtcatcattatcaatttatgggtgtaattatctttttatggttgtatcaaca

SEQ ID NO: 734 - DNA, 57 bp, synthetic construct
  source 1..57: mol_type = other DNA
tcggtgtcacaattatcaatttatgggtgtaataatcattttatggttgtatcaaca

SEQ ID NO: 735 - DNA, 57 bp, synthetic construct
  source 1..57: mol_type = other DNA
tcggtgtcattattatcaatttatgggtgtaataatcattttatggttgtatcaaca

SEQ ID NO: 736 - DNA, 57 bp, synthetic construct
  source 1..57: mol_type = other DNA
tcggtgtcatcattatcaatttatgggtgtaataatcattttatggttgtatcaaca

SEQ ID NO: 737 - DNA, 57 bp, synthetic construct
  source 1..57: mol_type = other DNA
tcggtgtcacaattatcaatttatgggtgtatttatcattttatggttgtatcaaca

SEQ ID NO: 738 - DNA, 57 bp, synthetic construct
  source 1..57: mol_type = other DNA
tcggtgtcattattatcaatttatgggtgtatttatcattttatggttgtatcaaca

SEQ ID NO: 739 - DNA, 57 bp, synthetic construct
  source 1..57: mol_type = other DNA
tcggtgtcatcattatcaatttatgggtgtatttatcattttatggttgtatcaaca

SEQ ID NO: 740 - DNA, 57 bp, synthetic construct
  source 1..57: mol_type = other DNA
tcggtgtcacaattatcaatttatgggggtaattatcattttatggttgtatcaaca

SEQ ID NO: 741 - DNA, 57 bp, synthetic construct
  source 1..57: mol_type = other DNA
tcggtgtcattattatcaatttatgggggtaattatcattttatggttgtatcaaca

SEQ ID NO: 742 - DNA, 57 bp, synthetic construct
  source 1..57: mol_type = other DNA
tcggtgtcatcattatcaatttatgggggtaattatcattttatggttgtatcaaca

SEQ ID NO: 743 - DNA, 57 bp, synthetic construct
  source 1..57: mol_type = other DNA
tcggtgtcacaattatcaattaatgggtgtaattatcattttatggttgtatcaaca

SEQ ID NO: 744 - DNA, 57 bp, synthetic construct
  source 1..57: mol_type = other DNA
tcggtgtcattattatcaattaatgggtgtaattatcattttatggttgtatcaaca

SEQ ID NO: 745 - DNA, 57 bp, synthetic construct
  source 1..57: mol_type = other DNA
tcggtgtcatcattatcaattaatgggtgtaattatcattttatggttgtatcaaca

SEQ ID NO: 746 - DNA, 57 bp, synthetic construct; identical to SEQ ID NO: 728
  source 1..57: mol_type = other DNA

SEQ ID NO: 747 - DNA, 57 bp, synthetic construct; identical to SEQ ID NO: 729
  source 1..57: mol_type = other DNA

SEQ ID NO: 748 - DNA, 57 bp, synthetic construct; identical to SEQ ID NO: 730
  source 1..57: mol_type = other DNA

SEQ ID NO: 749 - DNA, 57 bp, synthetic construct
  source 1..57: mol_type = other DNA
tcggtgtcacaattatcaatttatgggtgtaattatcatttattggttgtatcaaca

SEQ ID NO: 750 - DNA, 57 bp, synthetic construct
  source 1..57: mol_type = other DNA
tcggtgtcattattatcaatttatgggtgtaattatcatttattggttgtatcaaca

SEQ ID NO: 751 - DNA, 57 bp, synthetic construct
  source 1..57: mol_type = other DNA
tcggtgtcatcattatcaatttatgggtgtaattatcatttattggttgtatcaaca

SEQ ID NO: 752 - DNA, 57 bp, synthetic construct
  source 1..57: mol_type = other DNA
tcggtgtcacaattatcaatttatgggtgtaattatcttttattggttgtatcaaca

SEQ ID NO: 753 - DNA, 57 bp, synthetic construct
  source 1..57: mol_type = other DNA
tcggtgtcattattatcaatttatgggtgtaataatcatttattggttgtatcaaca

SEQ ID NO: 754 - DNA, 57 bp, synthetic construct
  source 1..57: mol_type = other DNA
tcggtgtcatcattatcaatttatgggtgtatttatcatttattggttgtatcaaca

SEQ ID NO: 755 - DNA, 57 bp, synthetic construct
  source 1..57: mol_type = other DNA
tcggtgtcacaattatcaatttatgggggtaattatcatttattggttgtatcaaca

SEQ ID NO: 756 - DNA, 57 bp, synthetic construct
  source 1..57: mol_type = other DNA
tcggtgtcattattatcaattaatgggtgtaattatcatttattggttgtatcaaca

SEQ ID NO: 757 - DNA, 57 bp, synthetic construct
  source 1..57: mol_type = other DNA
tcggtgtcatcattatcaattaatgggggtaataatcttttattggttgtatcaaca

SEQ ID NO: 758 - DNA, 57 bp, synthetic construct
  source 1..57: mol_type = other DNA
tcggtgtcacaattatcaattaatgggggtattaatcttttattggttgtatcaaca

SEQ ID NO: 759 - DNA, 57 bp, synthetic construct; identical to SEQ ID NO: 682
  source 1..57: mol_type = other DNA

SEQ ID NO: 760 - DNA, 57 bp, synthetic construct
  source 1..57: mol_type = other DNA
tgggagtgataattatcaatttatgggtgtaattatcattttatggttgtatcaaca

SEQ ID NO: 761 - DNA, 57 bp, synthetic construct
  source 1..57: mol_type = other DNA
tgggggtgataattatcaatttatgggtgtaattatcattttatggttgtatcaaca

SEQ ID NO: 762 - DNA, 57 bp, synthetic construct
  source 1..57: mol_type = other DNA
tgggtctgataattatcaatttatgggtgtaattatcattttatggttgtatcaaca

SEQ ID NO: 763 - DNA, 57 bp, synthetic construct
  source 1..57: mol_type = other DNA
tgggtgtaataattatcaatttatgggtgtaattatcattttatggttgtatcaaca

SEQ ID NO: 764 - DNA, 57 bp, synthetic construct
  source 1..57: mol_type = other DNA
tgggtgtgttaattatcaatttatgggtgtaattatcattttatggttgtatcaaca

SEQ ID NO: 765 - DNA, 57 bp, synthetic construct
  source 1..57: mol_type = other DNA
tgggtgtgctaattatcaatttatgggtgtaattatcattttatggttgtatcaaca

SEQ ID NO: 766 - DNA, 57 bp, synthetic construct
  source 1..57: mol_type = other DNA
tgggtgtggtaattatcaatttatgggtgtaattatcattttatggttgtatcaaca

SEQ ID NO: 767 - DNA, 57 bp, synthetic construct
  source 1..57: mol_type = other DNA
tgggtgtgatatttatcaatttatgggtgtaattatcattttatggttgtatcaaca

SEQ ID NO: 768 - DNA, 57 bp, synthetic construct
  source 1..57: mol_type = other DNA
tgggtgtgatacttatcaatttatgggtgtaattatcattttatggttgtatcaaca

SEQ ID NO: 769 - DNA, 57 bp, synthetic construct
  source 1..57: mol_type = other DNA
tgggtgtgatagttatcaatttatgggtgtaattatcattttatggttgtatcaaca

SEQ ID NO: 770 - DNA, 57 bp, synthetic construct
  source 1..57: mol_type = other DNA
tgggtgtgataataatcaatttatgggtgtaattatcattttatggttgtatcaaca

SEQ ID NO: 771 - DNA, 57 bp, synthetic construct
  source 1..57: mol_type = other DNA
tgggtgtgataattctcaatttatgggtgtaattatcattttatggttgtatcaaca

SEQ ID NO: 772 - DNA, 57 bp, synthetic construct
  source 1..57: mol_type = other DNA
tgggtgtgataattatctatttatgggtgtaattatcattttatggttgtatcaaca

SEQ ID NO: 773 - DNA, 57 bp, synthetic construct
  source 1..57: mol_type = other DNA
tgggtgtgataattatccatttatgggtgtaattatcattttatggttgtatcaaca

SEQ ID NO: 774 - DNA, 57 bp, synthetic construct
  source 1..57: mol_type = other DNA
tgggtgtgataattatcaacttatgggtgtaattatcattttatggttgtatcaaca

SEQ ID NO: 775 - DNA, 57 bp, synthetic construct
  source 1..57: mol_type = other DNA
tgggtgtgataattatcaaattatgggtgtaattatcattttatggttgtatcaaca

SEQ ID NO: 776 - DNA, 57 bp, synthetic construct
  source 1..57: mol_type = other DNA
tgggtgtgataattatcaagttatgggtgtaattatcattttatggttgtatcaaca

SEQ ID NO: 777 - DNA, 57 bp, synthetic construct
  source 1..57: mol_type = other DNA
tgggtgtgataattatcaatctatgggtgtaattatcattttatggttgtatcaaca

SEQ ID NO: 778 - DNA, 57 bp, synthetic construct; identical to SEQ ID NO: 692
  source 1..57: mol_type = other DNA

SEQ ID NO: 779 - DNA, 57 bp, synthetic construct
  source 1..57: mol_type = other DNA
tgggtgtgataattatcaattgatgggtgtaattatcattttatggttgtatcaaca

SEQ ID NO: 780 - DNA, 57 bp, synthetic construct
  source 1..57: mol_type = other DNA
tgggtgtgataattatcaatttttgggtgtaattatcattttatggttgtatcaaca

SEQ ID NO: 781 - DNA, 57 bp, synthetic construct; identical to SEQ ID NO: 693
  source 1..57: mol_type = other DNA

SEQ ID NO: 782 - DNA, 57 bp, synthetic construct
  source 1..57: mol_type = other DNA
tgggtgtgataattatcaatttgtgggtgtaattatcattttatggttgtatcaaca

SEQ ID NO: 783 - DNA, 57 bp, synthetic construct
  source 1..57: mol_type = other DNA
tgggtgtgataattatcaatttacgggtgtaattatcattttatggttgtatcaaca

SEQ ID NO: 784 - DNA, 57 bp, synthetic construct
  source 1..57: mol_type = other DNA
tgggtgtgataattatcaatttattggtgtaattatcattttatggttgtatcaaca

SEQ ID NO: 785 - DNA, 57 bp, synthetic construct
  source 1..57: mol_type = other DNA
tgggtgtgataattatcaatttatcggtgtaattatcattttatggttgtatcaaca

SEQ ID NO: 786 - DNA, 57 bp, synthetic construct
  source 1..57: mol_type = other DNA
tgggtgtgataattatcaatttataggtgtaattatcattttatggttgtatcaaca

SEQ ID NO: 787 - DNA, 57 bp, synthetic construct
  source 1..57: mol_type = other DNA
tgggtgtgataattatcaatttatgggtgtaattatcattttagggttgtatcaaca

SEQ ID NO: 788 - DNA, 57 bp, synthetic construct; identical to SEQ ID NO: 717
  source 1..57: mol_type = other DNA

SEQ ID NO: 789 - DNA, 57 bp, synthetic construct; identical to SEQ ID NO: 718
  source 1..57: mol_type = other DNA

SEQ ID NO: 790 - DNA, 57 bp, synthetic construct
  source 1..57: mol_type = other DNA
tgggtgtgataattatcaatttatgggtgtaattatcattttatggttgaatcaaca

SEQ ID NO: 791 - DNA, 57 bp, synthetic construct
  source 1..57: mol_type = other DNA
tgggtgtgataattatcaatttatgggtgtaattatcattttatggttgtctcaaca

SEQ ID NO: 792 - DNA, 57 bp, synthetic construct
  source 1..57: mol_type = other DNA
tgggtgtgataattatcaatttatgggtgtaattatcattttatggttgtatctaca

SEQ ID NO: 793 - DNA, 57 bp, synthetic construct
  source 1..57: mol_type = other DNA
tgggtgtgataattatcaatttatgggtgtaattatcattttatggttgtatccaca

SEQ ID NO: 794 - DNA, 57 bp, synthetic construct; identical to SEQ ID NO: 760
  source 1..57: mol_type = other DNA

SEQ ID NO: 795 - DNA, 57 bp, synthetic construct
  source 1..57: mol_type = other DNA
tgggagtggtaattatcaatttatgggtgtaattatcattttatggttgtatcaaca

SEQ ID NO: 796 - DNA, 57 bp, synthetic construct
  source 1..57: mol_type = other DNA
tgggagtggtaattatcaaattatgggtgtaattatcattttatggttgtatcaaca

SEQ ID NO: 797 - DNA, 57 bp, synthetic construct; identical to SEQ ID NO: 682
  source 1..57: mol_type = other DNA

SEQ ID NO: 798 - DNA, 57 bp, synthetic construct
  source 1..57: mol_type = other DNA
tgggtgtgataattatcattttatgggtgtaattatcattttatggttgtatcaaca

SEQ ID NO: 799 - DNA, 57 bp, synthetic construct
  source 1..57: mol_type = other DNA
tgggtgtgataattatcactttatgggtgtaattatcattttatggttgtatcaaca

SEQ ID NO: 800 - DNA, 57 bp, synthetic construct
  source 1..57: mol_type = other DNA
tgggtgtgataattatcagtttatgggtgtaattatcattttatggttgtatcaaca

SEQ ID NO: 801 - DNA, 57 bp, synthetic construct
  source 1..57: mol_type = other DNA
tgggtgtgataattatcaatttaggggtgtaattatcattttatggttgtatcaaca

SEQ ID NO: 802 - DNA, 57 bp, synthetic construct; identical to SEQ ID NO: 784
  source 1..57: mol_type = other DNA

SEQ ID NO: 803 - DNA, 57 bp, synthetic construct; identical to SEQ ID NO: 785
  source 1..57: mol_type = other DNA

SEQ ID NO: 804 - DNA, 57 bp, synthetic construct
  source 1..57: mol_type = other DNA
tgggtgtgataattatcaatttatgggtgcaattatcattttatggttgtatcaaca

SEQ ID NO: 805 - DNA, 57 bp, synthetic construct
  source 1..57: mol_type = other DNA
tgggtgtgataattatcaatttatgggtgttattatcattttatggttgtatcaaca

SEQ ID NO: 806 - DNA, 57 bp, synthetic construct
  source 1..57: mol_type = other DNA
tgggtgtgataattatcaatttatgggtgtcattatcattttatggttgtatcaaca

SEQ ID NO: 807 - DNA, 57 bp, synthetic construct
  source 1..57: mol_type = other DNA
tgggtgtgataattatcaatttatgggtgtaattatcactttatggttgtatcaaca

SEQ ID NO: 808 - DNA, 57 bp, synthetic construct; identical to SEQ ID NO: 705
  source 1..57: mol_type = other DNA

SEQ ID NO: 809 - DNA, 57 bp, synthetic construct; identical to SEQ ID NO: 706
  source 1..57: mol_type = other DNA

SEQ ID NO: 810 - DNA, 57 bp, synthetic construct; identical to SEQ ID NO: 707
  source 1..57: mol_type = other DNA

SEQ ID NO: 811 - DNA, 57 bp, synthetic construct
  source 1..57: mol_type = other DNA
tgggtgtgataattatcaatttatgggtgtaattatcattatatggttgtatcaaca

SEQ ID NO: 812 - DNA, 57 bp, synthetic construct
  source 1..57: mol_type = other DNA
tgggtgtgataattatcaatttatgggtgtaattatcattgtatggttgtatcaaca

SEQ ID NO: 813 - DNA, 57 bp, synthetic construct; identical to SEQ ID NO: 711
  source 1..57: mol_type = other DNA

SEQ ID NO: 814 - DNA, 57 bp, synthetic construct; identical to SEQ ID NO: 714
  source 1..57: mol_type = other DNA

SEQ ID NO: 815 - DNA, 57 bp, synthetic construct
  source 1..57: mol_type = other DNA
tgggtgtgataattatcaatttatgggtgtaattatcattttatggtagtatcaaca

SEQ ID NO: 816 - DNA, 57 bp, synthetic construct
  source 1..57: mol_type = other DNA
tgggtgtgataattatcaatttatgggtgtaattatcattttatggtggtatcaaca

SEQ ID NO: 817 - DNA, 57 bp, synthetic construct
  source 1..57: mol_type = other DNA
tgggtgtgataattatcaatttatgggtgtaattatcattttatggttctatcaaca

SEQ ID NO: 818 - DNA, 57 bp, synthetic construct
  source 1..57: mol_type = other DNA
tgggtgtgataattatcaatttatgggtgtaattatcattttatggttgtatcatca

SEQ ID NO: 819 - DNA, 57 bp, synthetic construct
  source 1..57: mol_type = other DNA
tgggtgtgataattatcaatttatgggtgtaattatcattttatggttgtatcacca

SEQ ID NO: 820 - DNA, 57 bp, synthetic construct
  source 1..57: mol_type = other DNA
tgggtgtgataattatcaatttatgggtgtaattatcattttatggttgtatcagca

SEQ ID NO: 821 - DNA, 57 bp, synthetic construct; identical to SEQ ID NO: 798
  source 1..57: mol_type = other DNA

SEQ ID NO: 822 - DNA, 57 bp, synthetic construct
  source 1..57: mol_type = other DNA
tgggtgtgataattatcattttatgggtgttattatcattttatggttgtatcaaca

SEQ ID NO: 823 - DNA, 57 bp, synthetic construct
  source 1..57: mol_type = other DNA
tgggtgtgataattatcattttatgggtgttattatcattatatggttgtatcaaca

SEQ ID NO: 824 - DNA, 57 bp, synthetic construct
  source 1..57: mol_type = other DNA
tgggtgtgataattatcattttatgggtgttattatcattaaatggttgtatcaaca

SEQ ID NO: 825 - DNA, 57 bp, synthetic construct
  source 1..57: mol_type = other DNA
tgggtgtgataattatcattttatgggtgttattatcattatatggtagtatcaaca

SEQ ID NO: 826 - DNA, 57 bp, synthetic construct
  source 1..57: mol_type = other DNA
tgggtgtgataattatcattttatgggtgttattatcattatatggttctatcaaca

SEQ ID NO: 827 - DNA, 57 bp, synthetic construct
  source 1..57: mol_type = other DNA
tgggtgtgataattatcattttatgggtgttattatcattatatggttgtatcatca

SEQ ID NO: 828 - DNA, 57 bp, synthetic construct
  source 1..57: mol_type = other DNA
tgggtgtgataattatcattttatgggtgttattatcattatatggttgtatcacca

SEQ ID NO: 829 - DNA, 57 bp, synthetic construct
  source 1..57: mol_type = other DNA
tgggtgtgataattatcattttatgggtgttattatcattatatggttgtatcagca

SEQ ID NO: 830 - DNA, 57 bp, synthetic construct
  source 1..57: mol_type = other DNA
tgggtgtgataattatcattttaggggtgttattatcattatatggttgtatcaaca

SEQ ID NO: 831 - DNA, 57 bp, synthetic construct
  source 1..57: mol_type = other DNA
tgggtgtgataattatcattttattggtgttattatcattatatggttgtatcaaca

SEQ ID NO: 832 - DNA, 57 bp, synthetic construct
  source 1..57: mol_type = other DNA
tgggtgtgataattatcattttatcggtgttattatcattatatggttgtatcaaca

SEQ ID NO: 833 - DNA, 57 bp, synthetic construct
  source 1..57: mol_type = other DNA
tgggtgtgataattatcattttatgggtgttattatcattaaatggtagtatcaaca

SEQ ID NO: 834 - DNA, 57 bp, synthetic construct
  source 1..57: mol_type = other DNA
tgggtgtgataattatcattttatgggtgttattatcattaaatggttctatcaaca

SEQ ID NO: 835 - DNA, 57 bp, synthetic construct
  source 1..57: mol_type = other DNA
tgggtgtgataattatcattttatgggtgttattatcattaaatggtagtatcatca

SEQ ID NO: 836 - DNA, 57 bp, synthetic construct
  source 1..57: mol_type = other DNA
tgggtgtgataattatcattttatgggtgttattatcattaaatggttctatcatca

SEQ ID NO: 837 - DNA, 57 bp, synthetic construct
  source 1..57: mol_type = other DNA
tgggtgtgataattatcattttatgggtgttattatcattaaatggtagtatcagca

SEQ ID NO: 838 - DNA, 57 bp, synthetic construct
  source 1..57: mol_type = other DNA
tgggtgtgataattatcattttatgggtgttattatcattaaatggttctatcagca

SEQ ID NO: 839 - DNA, 57 bp, synthetic construct
  source 1..57: mol_type = other DNA
tgggtgtgataattatcattttatgggtgttattatcattatatggtagtatcagca

SEQ ID NO: 840 - DNA, 57 bp, synthetic construct
  source 1..57: mol_type = other DNA
tgggtgtgataattatcattttatgggtgttattatcattatatggttctatcagca

SEQ ID NO: 841 - DNA, 57 bp, synthetic construct
  source 1..57: mol_type = other DNA
tgggtgtgataattatcattttaggggtgttattatcattatatggtagtatcagca

SEQ ID NO: 842 - DNA, 57 bp, synthetic construct
  source 1..57: mol_type = other DNA
tgggtgtgataattatcattttattggtgttattatcattatatggttctatcagca

SEQ ID NO: 843 - DNA, 57 bp, synthetic construct
  source 1..57: mol_type = other DNA
tgggtgtgataattatcattttaggggtgttattatcattaaatggtagtatcagca

SEQ ID NO: 844 - DNA, 57 bp, synthetic construct
  source 1..57: mol_type = other DNA
tgggtgtgataattatcattttattggtgttattatcattaaatggttctatcagca

SEQ ID NO: 845 - DNA, 127 bp, synthetic construct
  source 1..127: mol_type = other DNA
acatttgttgatacaaccataaaatgataattacacccataaattgataattatcacacccataaattgatattgcctctgatcatagtcagaccaacattgctacgacccgtattcgcaccgacac

SEQ ID NO: 846 - DNA, 127 bp, synthetic construct
  source 1..127: mol_type = other DNA
acatttgttgatacaaccataaaatgataattacacccataaattgataattatcacacccataaattgatattgcctcagatcatagtcagaccaacattgctacgacccgtattcgcaccgacac

SEQ ID NO: 847 - DNA, 127 bp, synthetic construct
  source 1..127: mol_type = other DNA
acatttgttgatacaaccataaaatgataattacacccataaattgataattatcacacccataaattgatattgcctcggatcatagtcagaccaacattgctacgacccgtattcgcaccgacac

SEQ ID NO: 848 - DNA, 127 bp, synthetic construct
  source 1..127: mol_type = other DNA
acatttgttgatacaaccataaaatgataattacacccataaattgataattatcacacccataaattgatattgcctccgatcatagtcagaccaacattgctacgacccgtattcgcaccgacac

SEQ ID NO: 849 - DNA, 127 bp, synthetic construct
  source 1..127: mol_type = other DNA
acatttgttgatacaaccataaaatgataattacacccataaattgataattatcacacccataaattgatattgcctatgatcatagtcagaccaacattgctacgacccgtattcgcaccgacac

SEQ ID NO: 850 - DNA, 127 bp, synthetic construct
  source 1..127: mol_type = other DNA
acatttgttgatacaaccataaaatgataattacacccataaattgataattatcacacccataaattgatattgcctttgatcatagtcagaccaacattgctacgacccgtattcgcaccgacac

SEQ ID NO: 851 - DNA, 127 bp, synthetic construct
  source 1..127: mol_type = other DNA
acatttgttgatacaaccataaaatgataattacacccataaattgataattatcacacccataaattgatattgcctgtgatcatagtcagaccaacattgctacgacccgtattcgcaccgacac

SEQ ID NO: 852 - DNA, 127 bp, synthetic construct
  source 1..127: mol_type = other DNA
acatttgttgatacaaccataaaatgataattacacccataaattgataattatcacacccataaattgatattgccactgatcatagtcagaccaacattgctacgacccgtattcgcaccgacac

SEQ ID NO: 853 - DNA, 127 bp, synthetic construct
  source 1..127: mol_type = other DNA
acatttgttgatacaaccataaaatgataattacacccataaattgataattatcacacccataaattgatattgccgctgatcatagtcagaccaacattgctacgacccgtattcgcaccgacac

SEQ ID NO: 854 - DNA, 127 bp, synthetic construct
  source 1..127: mol_type = other DNA
acatttgttgatacaaccataaaatgataattacacccataaattgataattatcacacccataaattgatattgcccctgatcatagtcagaccaacattgctacgacccgtattcgcaccgacac

SEQ ID NO: 855 - DNA, 127 bp, synthetic construct
  source 1..127: mol_type = other DNA
acatttgttgatacaaccataaaatgataattacacccataaattgataattatcacacccataaattgatattgcatctgatcatagtcagaccaacattgctacgacccgtattcgcaccgacac

SEQ ID NO: 856 - DNA, 127 bp, synthetic construct
  source 1..127: mol_type = other DNA
acatttgttgatacaaccataaaatgataattacacccataaattgataattatcacacccataaattgatattgcttctgatcatagtcagaccaacattgctacgacccgtattcgcaccgacac

SEQ ID NO: 857 - DNA, 127 bp, synthetic construct
  source 1..127: mol_type = other DNA
acatttgttgatacaaccataaaatgataattacacccataaattgataattatcacacccataaattgatattgcgtctgatcatagtcagaccaacattgctacgacccgtattcgcaccgacac

SEQ ID NO: 858 - DNA, 127 bp, synthetic construct
  source 1..127: mol_type = other DNA
acatttgttgatacaaccataaaatgataattacacccataaattgataattatcacacccataaattgatattgactctgatcatagtcagaccaacattgctacgacccgtattcgcaccgacac

SEQ ID NO: 859 - DNA, 127 bp, synthetic construct
  source 1..127: mol_type = other DNA
acatttgttgatacaaccataaaatgataattacacccataaattgataattatcacacccataaattgatattgtctctgatcatagtcagaccaacattgctacgacccgtattcgcaccgacac

SEQ ID NO: 860 - DNA, 127 bp, synthetic construct
  source 1..127: mol_type = other DNA
acatttgttgatacaaccataaaatgataattacacccataaattgataattatcacacccataaattgatattggctctgatcatagtcagaccaacattgctacgacccgtattcgcaccgacac

SEQ ID NO: 861 - DNA, 127 bp, synthetic construct
  source 1..127: mol_type = other DNA
acatttgttgatacaaccataaaatgataattacacccataaattgataattatcacacccataaattgatattacctctgatcatagtcagaccaacattgctacgacccgtattcgcaccgacac

SEQ ID NO: 862 - DNA, 127 bp, synthetic construct
  source 1..127: mol_type = other DNA
acatttgttgatacaaccataaaatgataattacacccataaattgataattatcacacccataaattgatatttcctctgatcatagtcagaccaacattgctacgacccgtattcgcaccgacac

SEQ ID NO: 863 - DNA, 127 bp, synthetic construct
  source 1..127: mol_type = other DNA
acatttgttgatacaaccataaaatgataattacacccataaattgataattatcacacccataaattgatattccctctgatcatagtcagaccaacattgctacgacccgtattcgcaccgacac

SEQ ID NO: 864 - DNA, 127 bp, synthetic construct
  source 1..127: mol_type = other DNA
acatttgttgatacaaccataaaatgataattacacccataaattgataattatcacacccataaattgatatagcctctgatcatagtcagaccaacattgctacgacccgtattcgcaccgacac

SEQ ID NO: 865 - DNA, 127 bp, synthetic construct
  source 1..127: mol_type = other DNA
acatttgttgatacaaccataaaatgataattacacccataaattgataattatcacacccataaattgatatggcctctgatcatagtcagaccaacattgctacgacccgtattcgcaccgacac

SEQ ID NO: 866 - DNA, 127 bp, synthetic construct
  source 1..127: mol_type = other DNA
acatttgttgatacaaccataaaatgataattacacccataaattgataattatcacacccataaattgatatcgcctctgatcatagtcagaccaacattgctacgacccgtattcgcaccgacac

SEQ ID NO: 867 - DNA, 127 bp, synthetic construct
  source 1..127: mol_type = other DNA
acatttgttgatacaaccataaaatgataattacacccataaattgataattatcacacccataaattgataatgcctctgatcatagtcagaccaacattgctacgacccgtattcgcaccgacac

SEQ ID NO: 868 - DNA, 127 bp, synthetic construct
  source 1..127: mol_type = other DNA
acatttgttgatacaaccataaaatgataattacacccataaattgataattatcacacccataaattgatagtgcctctgatcatagtcagaccaacattgctacgacccgtattcgcaccgacac

SEQ ID NO: 869 - DNA, 127 bp, synthetic construct
  source 1..127: mol_type = other DNA
acatttgttgatacaaccataaaatgataattacacccataaattgataattatcacacccataaattgatactgcctctgatcatagtcagaccaacattgctacgacccgtattcgcaccgacac

SEQ ID NO: 870 - DNA, 127 bp, synthetic construct
  source 1..127: mol_type = other DNA
acatttgttgatacaaccataaaatgataattacacccataaattgataattatcacacccataaattgattttgcctctgatcatagtcagaccaacattgctacgacccgtattcgcaccgacac

SEQ ID NO: 871 - DNA, 127 bp, synthetic construct
  source 1..127: mol_type = other DNA
acatttgttgatacaaccataaaatgataattacacccataaattgataattatcacacccataaattgatgttgcctctgatcatagtcagaccaacattgctacgacccgtattcgcaccgacac

SEQ ID NO: 872 - DNA, 127 bp, synthetic construct
  source 1..127: mol_type = other DNA
acatttgttgatacaaccataaaatgataattacacccataaattgataattatcacacccataaattgatcttgcctctgatcatagtcagaccaacattgctacgacccgtattcgcaccgacac

SEQ ID NO: 873 - DNA, 127 bp, synthetic construct
  source 1..127: mol_type = other DNA
acatttgttgatacaaccataaaatgataattacacccataaattgataattatcacacccataaattgaaattgcctctgatcatagtcagaccaacattgctacgacccgtattcgcaccgacac

SEQ ID NO: 874 - DNA, 127 bp, synthetic construct
  source 1..127: mol_type = other DNA
acatttgttgatacaaccataaaatgataattacacccataaattgataattatcacacccataaattgagattgcctctgatcatagtcagaccaacattgctacgacccgtattcgcaccgacac

SEQ ID NO: 875 - DNA, 127 bp, synthetic construct
  source 1..127: mol_type = other DNA
acatttgttgatacaaccataaaatgataattacacccataaattgataattatcacacccataaattgacattgcctctgatcatagtcagaccaacattgctacgacccgtattcgcaccgacac

SEQ ID NO: 876 - DNA, 127 bp, synthetic construct
  source 1..127: mol_type = other DNA
acatttgttgatacaaccataaaatgataattacacccataaattgataattatcacacccataaattgttattgcctctgatcatagtcagaccaacattgctacgacccgtattcgcaccgacac

SEQ ID NO: 877 - DNA, 127 bp, synthetic construct
  source 1..127: mol_type = other DNA
acatttgttgatacaaccataaaatgataattacacccataaattgataattatcacacccataaattggtattgcctctgatcatagtcagaccaacattgctacgacccgtattcgcaccgacac

SEQ ID NO: 878 - DNA, 127 bp, synthetic construct
  source 1..127: mol_type = other DNA
acatttgttgatacaaccataaaatgataattacacccataaattgataattatcacacccataaattgctattgcctctgatcatagtcagaccaacattgctacgacccgtattcgcaccgacac

SEQ ID NO: 879 - DNA, 127 bp, synthetic construct
  source 1..127: mol_type = other DNA
acatttgttgatacaaccataaaatgataattacacccataaattgataattatcacacccataaattaatattgcctctgatcatagtcagaccaacattgctacgacccgtattcgcaccgacac

SEQ ID NO: 880 - DNA, 127 bp, synthetic construct
  source 1..127: mol_type = other DNA
acatttgttgatacaaccataaaatgataattacacccataaattgataattatcacacccataaatttatattgcctctgatcatagtcagaccaacattgctacgacccgtattcgcaccgacac

SEQ ID NO: 881 - DNA, 127 bp, synthetic construct
  source 1..127: mol_type = other DNA
acatttgttgatacaaccataaaatgataattacacccataaattgataattatcacacccataaattcatattgcctctgatcatagtcagaccaacattgctacgacccgtattcgcaccgacac

SEQ ID NO: 882 - DNA, 127 bp, synthetic construct
  source 1..127: mol_type = other DNA
acatttgttgatacaaccataaaatgataattacacccataaattgataattatcacacccataaatagatattgcctctgatcatagtcagaccaacattgctacgacccgtattcgcaccgacac

SEQ ID NO: 883 - DNA, 127 bp, synthetic construct
  source 1..127: mol_type = other DNA
acatttgttgatacaaccataaaatgataattacacccataaattgataattatcacacccataaatggatattgcctctgatcatagtcagaccaacattgctacgacccgtattcgcaccgacac

SEQ ID NO: 884 - DNA, 127 bp, synthetic construct
  source 1..127: mol_type = other DNA
acatttgttgatacaaccataaaatgataattacacccataaattgataattatcacacccataaatcgatattgcctctgatcatagtcagaccaacattgctacgacccgtattcgcaccgacac

SEQ ID NO: 885 - DNA, 127 bp, synthetic construct
  source 1..127: mol_type = other DNA
acatttgttgatacaaccataaaatgataattacacccataaattgataattatcacacccataaaatgatattgcctctgatcatagtcagaccaacattgctacgacccgtattcgcaccgacac

SEQ ID NO: 886 - DNA, 127 bp, synthetic construct
  source 1..127: mol_type = other DNA
acatttgttgatacaaccataaaatgataattacacccataaattgataattatcacacccataaagtgatattgcctctgatcatagtcagaccaacattgctacgacccgtattcgcaccgacac

SEQ ID NO: 887 - DNA, 127 bp, synthetic construct
  source 1..127: mol_type = other DNA
acatttgttgatacaaccataaaatgataattacacccataaattgataattatcacacccataaactgatattgcctctgatcatagtcagaccaacattgctacgacccgtattcgcaccgacac

SEQ ID NO: 888 - DNA, 127 bp, synthetic construct
  source 1..127: mol_type = other DNA
acatttgttgatacaaccataaaatgataattacacccataaattgataattatcacacccataatttgatattgcctctgatcatagtcagaccaacattgctacgacccgtattcgcaccgacac

SEQ ID NO: 889 - DNA, 127 bp, synthetic construct
  source 1..127: mol_type = other DNA
acatttgttgatacaaccataaaatgataattacacccataaattgataattatcacacccataagttgatattgcctctgatcatagtcagaccaacattgctacgacccgtattcgcaccgacac

SEQ ID NO: 890 - DNA, 127 bp, synthetic construct
  source 1..127: mol_type = other DNA
acatttgttgatacaaccataaaatgataattacacccataaattgataattatcacacccataacttgatattgcctctgatcatagtcagaccaacattgctacgacccgtattcgcaccgacac

SEQ ID NO: 891 - DNA, 127 bp, synthetic construct
  source 1..127: mol_type = other DNA
acatttgttgatacaaccataaaatgataattacacccataaattgataattatcacacccatatattgatattgcctctgatcatagtcagaccaacattgctacgacccgtattcgcaccgacac

SEQ ID NO: 892 - DNA, 127 bp, synthetic construct
  source 1..127: mol_type = other DNA
acatttgttgatacaaccataaaatgataattacacccataaattgataattatcacacccatagattgatattgcctctgatcatagtcagaccaacattgctacgacccgtattcgcaccgacac

SEQ ID NO: 893 - DNA, 127 bp, synthetic construct
  source 1..127: mol_type = other DNA
acatttgttgatacaaccataaaatgataattacacccataaattgataattatcacacccatacattgatattgcctctgatcatagtcagaccaacattgctacgacccgtattcgcaccgacac

SEQ ID NO: 894 - DNA, 127 bp, synthetic construct
  source 1..127: mol_type = other DNA
acatttgttgatacaaccataaaatgataattacacccataaattgataattatcacacccattaattgatattgcctctgatcatagtcagaccaacattgctacgacccgtattcgcaccgacac

SEQ ID NO: 895 - DNA, 127 bp, synthetic construct
  source 1..127: mol_type = other DNA
acatttgttgatacaaccataaaatgataattacacccataaattgataattatcacacccatgaattgatattgcctctgatcatagtcagaccaacattgctacgacccgtattcgcaccgacac

SEQ ID NO: 896 - DNA, 127 bp, synthetic construct
  source 1..127: mol_type = other DNA
acatttgttgatacaaccataaaatgataattacacccataaattgataattatcacacccatcaattgatattgcctctgatcatagtcagaccaacattgctacgacccgtattcgcaccgacac

SEQ ID NO: 897 - DNA, 127 bp, synthetic construct
  source 1..127: mol_type = other DNA
acatttgttgatacaaccataaaatgataattacacccataaattgataattatcacacccaaaaattgatattgcctctgatcatagtcagaccaacattgctacgacccgtattcgcaccgacac

SEQ ID NO: 898 - DNA, 127 bp, synthetic construct
  source 1..127: mol_type = other DNA
acatttgttgatacaaccataaaatgataattacacccataaattgataattatcacacccagaaattgatattgcctctgatcatagtcagaccaacattgctacgacccgtattcgcaccgacac

SEQ ID NO: 899 - DNA, 127 bp, synthetic construct
  source 1..127: mol_type = other DNA
acatttgttgatacaaccataaaatgataattacacccataaattgataattatcacacccacaaattgatattgcctctgatcatagtcagaccaacattgctacgacccgtattcgcaccgacac

SEQ ID NO: 900 - DNA, 127 bp, synthetic construct
  source 1..127: mol_type = other DNA
acatttgttgatacaaccataaaatgataattacacccataaattgataattatcacacccttaaattgatattgcctctgatcatagtcagaccaacattgctacgacccgtattcgcaccgacac

SEQ ID NO: 901 - DNA, 127 bp, synthetic construct
  source 1..127: mol_type = other DNA
acatttgttgatacaaccataaaatgataattacacccataaattgataattatcacacccgtaaattgatattgcctctgatcatagtcagaccaacattgctacgacccgtattcgcaccgacac

SEQ ID NO: 902 - DNA, 127 bp, synthetic construct
  source 1..127: mol_type = other DNA
acatttgttgatacaaccataaaatgataattacacccataaattgataattatcacacccctaaattgatattgcctctgatcatagtcagaccaacattgctacgacccgtattcgcaccgacac

SEQ ID NO: 903 - DNA, 127 bp, synthetic construct
  source 1..127: mol_type = other DNA
acatttgttgatacaaccataaaatgataattacacccataaattgataattatcacaccaataaattgatattgcctctgatcatagtcagaccaacattgctacgacccgtattcgcaccgacac

SEQ ID NO: 904 - DNA, 127 bp, synthetic construct
  source 1..127: mol_type = other DNA
acatttgttgatacaaccataaaatgataattacacccataaattgataattatcacacctataaattgatattgcctctgatcatagtcagaccaacattgctacgacccgtattcgcaccgacac

SEQ ID NO: 905 - DNA, 127 bp, synthetic construct
  source 1..127: mol_type = other DNA
acatttgttgatacaaccataaaatgataattacacccataaattgataattatcacaccgataaattgatattgcctctgatcatagtcagaccaacattgctacgacccgtattcgcaccgacac

SEQ ID NO: 906 - DNA, 127 bp, synthetic construct
  source 1..127: mol_type = other DNA
acatttgttgatacaaccataaaatgataattacacccataaattgataattatcacacacataaattgatattgcctctgatcatagtcagaccaacattgctacgacccgtattcgcaccgacac

SEQ ID NO: 907 - DNA, 127 bp, synthetic construct
  source 1..127: mol_type = other DNA
acatttgttgatacaaccataaaatgataattacacccataaattgataattatcacactcataaattgatattgcctctgatcatagtcagaccaacattgctacgacccgtattcgcaccgacac

SEQ ID NO: 908 - DNA, 127 bp, synthetic construct
  source 1..127: mol_type = other DNA
acatttgttgatacaaccataaaatgataattacacccataaattgataattatcacacgcataaattgatattgcctctgatcatagtcagaccaacattgctacgacccgtattcgcaccgacac

SEQ ID NO: 909 - DNA, 127 bp, synthetic construct
  source 1..127: mol_type = other DNA
acatttgttgatacaaccataaaatgataattacacccataaattgataattatcacaaccataaattgatattgcctctgatcatagtcagaccaacattgctacgacccgtattcgcaccgacac

SEQ ID NO: 910 - DNA, 127 bp, synthetic construct
  source 1..127: mol_type = other DNA
acatttgttgatacaaccataaaatgataattacacccataaattgataattatcacatccataaattgatattgcctctgatcatagtcagaccaacattgctacgacccgtattcgcaccgacac

SEQ ID NO: 911 - DNA, 127 bp, synthetic construct
  source 1..127: mol_type = other DNA
acatttgttgatacaaccataaaatgataattacacccataaattgataattatcacagccataaattgatattgcctctgatcatagtcagaccaacattgctacgacccgtattcgcaccgacac

SEQ ID NO: 912 - DNA, 127 bp, synthetic construct
  source 1..127: mol_type = other DNA
acatttgttgatacaaccataaaatgataattacacccataaattgataattatcactcccataaattgatattgcctctgatcatagtcagaccaacattgctacgacccgtattcgcaccgacac

SEQ ID NO: 913 - DNA, 127 bp, synthetic construct
  source 1..127: mol_type = other DNA
acatttgttgatacaaccataaaatgataattacacccataaattgataattatcacgcccataaattgatattgcctctgatcatagtcagaccaacattgctacgacccgtattcgcaccgacac

SEQ ID NO: 914 - DNA, 127 bp, synthetic construct
  source 1..127: mol_type = other DNA
acatttgttgatacaaccataaaatgataattacacccataaattgataattatcacccccataaattgatattgcctctgatcatagtcagaccaacattgctacgacccgtattcgcaccgacac

SEQ ID NO: 915 - DNA, 127 bp, synthetic construct
  source 1..127: mol_type = other DNA
acatttgttgatacaaccataaaatgataattacacccataaattgataattatcaaacccataaattgatattgcctctgatcatagtcagaccaacattgctacgacccgtattcgcaccgacac

SEQ ID NO: 916 - DNA, 127 bp, synthetic construct
  source 1..127: mol_type = other DNA
acatttgttgatacaaccataaaatgataattacacccataaattgataattatcatacccataaattgatattgcctctgatcatagtcagaccaacattgctacgacccgtattcgcaccgacac

SEQ ID NO: 917 - DNA, 127 bp, synthetic construct
  source 1..127: mol_type = other DNA
acatttgttgatacaaccataaaatgataattacacccataaattgataattatcagacccataaattgatattgcctctgatcatagtcagaccaacattgctacgacccgtattcgcaccgacac

SEQ ID NO: 918 - DNA, 127 bp, synthetic construct
  source 1..127: mol_type = other DNA
acatttgttgatacaaccataaaatgataattacacccataaattgataattatctcacccataaattgatattgcctctgatcatagtcagaccaacattgctacgacccgtattcgcaccgacac

SEQ ID NO: 919 - DNA, 127 bp, synthetic construct
  source 1..127: mol_type = other DNA
acatttgttgatacaaccataaaatgataattacacccataaattgataattatcgcacccataaattgatattgcctctgatcatagtcagaccaacattgctacgacccgtattcgcaccgacac

SEQ ID NO: 920 - DNA, 127 bp, synthetic construct
  source 1..127: mol_type = other DNA
acatttgttgatacaaccataaaatgataattacacccataaattgataattatcccacccataaattgatattgcctctgatcatagtcagaccaacattgctacgacccgtattcgcaccgacac

SEQ ID NO: 921 - DNA, 127 bp, synthetic construct
  source 1..127: mol_type = other DNA
acatttgttgatacaaccataaaatgataattacacccataaattgataattataacacccataaattgatattgcctctgatcatagtcagaccaacattgctacgacccgtattcgcaccgacac

SEQ ID NO: 922 - DNA, 127 bp, synthetic construct
  source 1..127: mol_type = other DNA
acatttgttgatacaaccataaaatgataattacacccataaattgataattattacacccataaattgatattgcctctgatcatagtcagaccaacattgctacgacccgtattcgcaccgacac

SEQ ID NO: 923 - DNA, 127 bp, synthetic construct
  source 1..127: mol_type = other DNA
acatttgttgatacaaccataaaatgataattacacccataaattgataattatgacacccataaattgatattgcctctgatcatagtcagaccaacattgctacgacccgtattcgcaccgacac

SEQ ID NO: 924 - DNA, 127 bp, synthetic construct
  source 1..127: mol_type = other DNA
acatttgttgatacaaccataaaatgataattacacccataaattgataattaacacacccataaattgatattgcctctgatcatagtcagaccaacattgctacgacccgtattcgcaccgacac

SEQ ID NO: 925 - DNA, 127 bp, synthetic construct
  source 1..127: mol_type = other DNA
acatttgttgatacaaccataaaatgataattacacccataaattgataattagcacacccataaattgatattgcctctgatcatagtcagaccaacattgctacgacccgtattcgcaccgacac

SEQ ID NO: 926 - DNA, 127 bp, synthetic construct
  source 1..127: mol_type = other DNA
acatttgttgatacaaccataaaatgataattacacccataaattgataattaccacacccataaattgatattgcctctgatcatagtcagaccaacattgctacgacccgtattcgcaccgacac

SEQ ID NO: 927 - DNA, 127 bp, synthetic construct
  source 1..127: mol_type = other DNA
acatttgttgatacaaccataaaatgataattacacccataaattgataattttcacacccataaattgatattgcctctgatcatagtcagaccaacattgctacgacccgtattcgcaccgacac

SEQ ID NO: 928 - DNA, 127 bp, synthetic construct
  source 1..127: mol_type = other DNA
acatttgttgatacaaccataaaatgataattacacccataaattgataattgtcacacccataaattgatattgcctctgatcatagtcagaccaacattgctacgacccgtattcgcaccgacac

SEQ ID NO: 929 - DNA, 127 bp, synthetic construct
  source 1..127: mol_type = other DNA
acatttgttgatacaaccataaaatgataattacacccataaattgataattctcacacccataaattgatattgcctctgatcatagtcagaccaacattgctacgacccgtattcgcaccgacac

SEQ ID NO: 930 - DNA, 127 bp, synthetic construct
  source 1..127: mol_type = other DNA
acatttgttgatacaaccataaaatgataattacacccataaattgataataatcacacccataaattgatattgcctctgatcatagtcagaccaacattgctacgacccgtattcgcaccgacac

SEQ ID NO: 931 - DNA, 127 bp, synthetic construct
  source 1..127: mol_type = other DNA
acatttgttgatacaaccataaaatgataattacacccataaattgataatgatcacacccataaattgatattgcctctgatcatagtcagaccaacattgctacgacccgtattcgcaccgacac

SEQ ID NO: 932 - DNA, 127 bp, synthetic construct
  source 1..127: mol_type = other DNA
acatttgttgatacaaccataaaatgataattacacccataaattgataatcatcacacccataaattgatattgcctctgatcatagtcagaccaacattgctacgacccgtattcgcaccgacac

SEQ ID NO: 933 - DNA, 127 bp, synthetic construct
  source 1..127: mol_type = other DNA
acatttgttgatacaaccataaaatgataattacacccataaattgataaatatcacacccataaattgatattgcctctgatcatagtcagaccaacattgctacgacccgtattcgcaccgacac

SEQ ID NO: 934 - DNA, 127 bp, synthetic construct
  source 1..127: mol_type = other DNA
acatttgttgatacaaccataaaatgataattacacccataaattgataagtatcacacccataaattgatattgcctctgatcatagtcagaccaacattgctacgacccgtattcgcaccgacac

SEQ ID NO: 935 - DNA, 127 bp, synthetic construct
  source 1..127: mol_type = other DNA
acatttgttgatacaaccataaaatgataattacacccataaattgataactatcacacccataaattgatattgcctctgatcatagtcagaccaacattgctacgacccgtattcgcaccgacac

SEQ ID NO: 936 - DNA, 127 bp, synthetic construct
  source 1..127: mol_type = other DNA
acatttgttgatacaaccataaaatgataattacacccataaattgatatttatcacacccataaattgatattgcctctgatcatagtcagaccaacattgctacgacccgtattcgcaccgacac

SEQ ID NO: 937 - DNA, 127 bp, synthetic construct
  source 1..127: mol_type = other DNA
acatttgttgatacaaccataaaatgataattacacccataaattgatagttatcacacccataaattgatattgcctctgatcatagtcagaccaacattgctacgacccgtattcgcaccgacac

SEQ ID NO: 938 - DNA, 127 bp, synthetic construct
  source 1..127: mol_type = other DNA
acatttgttgatacaaccataaaatgataattacacccataaattgatacttatcacacccataaattgatattgcctctgatcatagtcagaccaacattgctacgacccgtattcgcaccgacac

SEQ ID NO: 939 - DNA, 127 bp, synthetic construct
  source 1..127: mol_type = other DNA
acatttgttgatacaaccataaaatgataattacacccataaattgattattatcacacccataaattgatattgcctctgatcatagtcagaccaacattgctacgacccgtattcgcaccgacac

SEQ ID NO: 940 - DNA, 127 bp, synthetic construct
  source 1..127: mol_type = other DNA
acatttgttgatacaaccataaaatgataattacacccataaattgatgattatcacacccataaattgatattgcctctgatcatagtcagaccaacattgctacgacccgtattcgcaccgacac

SEQ ID NO: 941 - DNA, 127 bp, synthetic construct
  source 1..127: mol_type = other DNA
acatttgttgatacaaccataaaatgataattacacccataaattgatcattatcacacccataaattgatattgcctctgatcatagtcagaccaacattgctacgacccgtattcgcaccgacac

SEQ ID NO: 942 - DNA, 127 bp, synthetic construct
  source 1..127: mol_type = other DNA
acatttgttgatacaaccataaaatgataattacacccataaattgaaaattatcacacccataaattgatattgcctctgatcatagtcagaccaacattgctacgacccgtattcgcaccgacac

SEQ ID NO: 943 - DNA, 127 bp, synthetic construct
  source 1..127: mol_type = other DNA
acatttgttgatacaaccataaaatgataattacacccataaattgagaattatcacacccataaattgatattgcctctgatcatagtcagaccaacattgctacgacccgtattcgcaccgacac

SEQ ID NO: 944 - DNA, 127 bp, synthetic construct
  source 1..127: mol_type = other DNA
acatttgttgatacaaccataaaatgataattacacccataaattgacaattatcacacccataaattgatattgcctctgatcatagtcagaccaacattgctacgacccgtattcgcaccgacac

SEQ ID NO: 945 - DNA, 127 bp, synthetic construct
  source 1..127: mol_type = other DNA
acatttgttgatacaaccataaaatgataattacacccataaattgttaattatcacacccataaattgatattgcctctgatcatagtcagaccaacattgctacgacccgtattcgcaccgacac

SEQ ID NO: 946 - DNA, 127 bp, synthetic construct
  source 1..127: mol_type = other DNA
acatttgttgatacaaccataaaatgataattacacccataaattggtaattatcacacccataaattgatattgcctctgatcatagtcagaccaacattgctacgacccgtattcgcaccgacac

SEQ ID NO: 947 - DNA, 127 bp, synthetic construct
  source 1..127: mol_type = other DNA
acatttgttgatacaaccataaaatgataattacacccataaattgctaattatcacacccataaattgatattgcctctgatcatagtcagaccaacattgctacgacccgtattcgcaccgacac

SEQ ID NO: 948 - DNA, 127 bp, synthetic construct
  source 1..127: mol_type = other DNA
acatttgttgatacaaccataaaatgataattacacccataaattaataattatcacacccataaattgatattgcctctgatcatagtcagaccaacattgctacgacccgtattcgcaccgacac

SEQ ID NO: 949 - DNA, 127 bp, synthetic construct
  source 1..127: mol_type = other DNA
acatttgttgatacaaccataaaatgataattacacccataaatttataattatcacacccataaattgatattgcctctgatcatagtcagaccaacattgctacgacccgtattcgcaccgacac

SEQ ID NO: 950 - DNA, 127 bp, synthetic construct
  source 1..127: mol_type = other DNA
acatttgttgatacaaccataaaatgataattacacccataaattcataattatcacacccataaattgatattgcctctgatcatagtcagaccaacattgctacgacccgtattcgcaccgacac

SEQ ID NO: 951 - DNA, 127 bp, synthetic construct
  source 1..127: mol_type = other DNA
acatttgttgatacaaccataaaatgataattacacccataaatagataattatcacacccataaattgatattgcctctgatcatagtcagaccaacattgctacgacccgtattcgcaccgacac

SEQ ID NO: 952 - DNA, 127 bp, synthetic construct
  source 1..127: mol_type = other DNA
acatttgttgatacaaccataaaatgataattacacccataaatggataattatcacacccataaattgatattgcctctgatcatagtcagaccaacattgctacgacccgtattcgcaccgacac

SEQ ID NO: 953 - DNA, 127 bp, synthetic construct
  source 1..127: mol_type = other DNA
acatttgttgatacaaccataaaatgataattacacccataaatcgataattatcacacccataaattgatattgcctctgatcatagtcagaccaacattgctacgacccgtattcgcaccgacac

SEQ ID NO: 954 - DNA, 127 bp, synthetic construct
  source 1..127: mol_type = other DNA
acatttgttgatacaaccataaaatgataattacacccataaaatgataattatcacacccataaattgatattgcctctgatcatagtcagaccaacattgctacgacccgtattcgcaccgacac

SEQ ID NO: 955 - DNA, 127 bp, synthetic construct
  source 1..127: mol_type = other DNA
acatttgttgatacaaccataaaatgataattacacccataaagtgataattatcacacccataaattgatattgcctctgatcatagtcagaccaacattgctacgacccgtattcgcaccgacac

SEQ ID NO: 956 - DNA, 127 bp, synthetic construct
  source 1..127: mol_type = other DNA
acatttgttgatacaaccataaaatgataattacacccataaactgataattatcacacccataaattgatattgcctctgatcatagtcagaccaacattgctacgacccgtattcgcaccgacac

SEQ ID NO: 957 - DNA, 127 bp, synthetic construct
  source 1..127: mol_type = other DNA
acatttgttgatacaaccataaaatgataattacacccataatttgataattatcacacccataaattgatattgcctctgatcatagtcagaccaacattgctacgacccgtattcgcaccgacac

SEQ ID NO: 958 - DNA, 127 bp, synthetic construct
  source 1..127: mol_type = other DNA
acatttgttgatacaaccataaaatgataattacacccataagttgataattatcacacccataaattgatattgcctctgatcatagtcagaccaacattgctacgacccgtattcgcaccgacac

SEQ ID NO: 959 - DNA, 127 bp, synthetic construct
  source 1..127: mol_type = other DNA
acatttgttgatacaaccataaaatgataattacacccataacttgataattatcacacccataaattgatattgcctctgatcatagtcagaccaacattgctacgacccgtattcgcaccgacac

SEQ ID NO: 960 - DNA, 127 bp, synthetic construct
  source 1..127: mol_type = other DNA
acatttgttgatacaaccataaaatgataattacacccatatattgataattatcacacccataaattgatattgcctctgatcatagtcagaccaacattgctacgacccgtattcgcaccgacac

SEQ ID NO: 961 - DNA, 127 bp, synthetic construct
  source 1..127: mol_type = other DNA
acatttgttgatacaaccataaaatgataattacacccatagattgataattatcacacccataaattgatattgcctctgatcatagtcagaccaacattgctacgacccgtattcgcaccgacac

SEQ ID NO: 962 - DNA, 127 bp, synthetic construct
  source 1..127: mol_type = other DNA
acatttgttgatacaaccataaaatgataattacacccatacattgataattatcacacccataaattgatattgcctctgatcatagtcagaccaacattgctacgacccgtattcgcaccgacac

SEQ ID NO: 963 - DNA, 127 bp, synthetic construct
  source 1..127: mol_type = other DNA
acatttgttgatacaaccataaaatgataattacacccattaattgataattatcacacccataaattgatattgcctctgatcatagtcagaccaacattgctacgacccgtattcgcaccgacac

SEQ ID NO: 964 - DNA, 127 bp, synthetic construct
  source 1..127: mol_type = other DNA
acatttgttgatacaaccataaaatgataattacacccatgaattgataattatcacacccataaattgatattgcctctgatcatagtcagaccaacattgctacgacccgtattcgcaccgacac

SEQ ID NO: 965 - DNA, 127 bp, synthetic construct
  source 1..127: mol_type = other DNA
acatttgttgatacaaccataaaatgataattacacccatcaattgataattatcacacccataaattgatattgcctctgatcatagtcagaccaacattgctacgacccgtattcgcaccgacac

SEQ ID NO: 966 - DNA, 127 bp, synthetic construct
  source 1..127: mol_type = other DNA
acatttgttgatacaaccataaaatgataattacacccaaaaattgataattatcacacccataaattgatattgcctctgatcatagtcagaccaacattgctacgacccgtattcgcaccgacac

SEQ ID NO: 967 - DNA, 127 bp, synthetic construct
  source 1..127: mol_type = other DNA
acatttgttgatacaaccataaaatgataattacacccagaaattgataattatcacacccataaattgatattgcctctgatcatagtcagaccaacattgctacgacccgtattcgcaccgacac

SEQ ID NO: 968 - DNA, 127 bp, synthetic construct
  source 1..127: mol_type = other DNA
acatttgttgatacaaccataaaatgataattacacccacaaattgataattatcacacccataaattgatattgcctctgatcatagtcagaccaacattgctacgacccgtattcgcaccgacac

SEQ ID NO: 969 - DNA, 127 bp, synthetic construct
  source 1..127: mol_type = other DNA
acatttgttgatacaaccataaaatgataattacacccttaaattgataattatcacacccataaattgatattgcctctgatcatagtcagaccaacattgctacgacccgtattcgcaccgacac

SEQ ID NO: 970 - DNA, 127 bp, synthetic construct
  source 1..127: mol_type = other DNA
acatttgttgatacaaccataaaatgataattacacccgtaaattgataattatcacacccataaattgatattgcctctgatcatagtcagaccaacattgctacgacccgtattcgcaccgacac

SEQ ID NO: 971 - DNA, 127 bp, synthetic construct
  source 1..127: mol_type = other DNA
acatttgttgatacaaccataaaatgataattacacccctaaattgataattatcacacccataaattgatattgcctctgatcatagtcagaccaacattgctacgacccgtattcgcaccgacac

SEQ ID NO: 972 - DNA, 127 bp, synthetic construct
  source 1..127: mol_type = other DNA
acatttgttgatacaaccataaaatgataattacaccaataaattgataattatcacacccataaattgatattgcctctgatcatagtcagaccaacattgctacgacccgtattcgcaccgacac

SEQ ID NO: 973 - DNA, 127 bp, synthetic construct
  source 1..127: mol_type = other DNA
acatttgttgatacaaccataaaatgataattacacctataaattgataattatcacacccataaattgatattgcctctgatcatagtcagaccaacattgctacgacccgtattcgcaccgacac

SEQ ID NO: 974 - DNA, 127 bp, synthetic construct
  source 1..127: mol_type = other DNA
acatttgttgatacaaccataaaatgataattacaccgataaattgataattatcacacccataaattgatattgcctctgatcatagtcagaccaacattgctacgacccgtattcgcaccgacac

SEQ ID NO: 975 - DNA, 127 bp, synthetic construct
  source 1..127: mol_type = other DNA
acatttgttgatacaaccataaaatgataattacacacataaattgataattatcacacccataaattgatattgcctctgatcatagtcagaccaacattgctacgacccgtattcgcaccgacac

SEQ ID NO: 976 - DNA, 127 bp, synthetic construct
  source 1..127: mol_type = other DNA
acatttgttgatacaaccataaaatgataattacactcataaattgataattatcacacccataaattgatattgcctctgatcatagtcagaccaacattgctacgacccgtattcgcaccgacac

SEQ ID NO: 977 - DNA, 127 bp, synthetic construct
  source 1..127: mol_type = other DNA
acatttgttgatacaaccataaaatgataattacacgcataaattgataattatcacacccataaattgatattgcctctgatcatagtcagaccaacattgctacgacccgtattcgcaccgacac

SEQ ID NO: 978 - DNA, 127 bp, synthetic construct
  source 1..127: mol_type = other DNA
acatttgttgatacaaccataaaatgataattacaaccataaattgataattatcacacccataaattgatattgcctctgatcatagtcagaccaacattgctacgacccgtattcgcaccgacac

SEQ ID NO: 979 - DNA, 127 bp, synthetic construct
  source 1..127: mol_type = other DNA
acatttgttgatacaaccataaaatgataattacatccataaattgataattatcacacccataaattgatattgcctctgatcatagtcagaccaacattgctacgacccgtattcgcaccgacac

SEQ ID NO: 980 - DNA, 127 bp, synthetic construct
  source 1..127: mol_type = other DNA
acatttgttgatacaaccataaaatgataattacagccataaattgataattatcacacccataaattgatattgcctctgatcatagtcagaccaacattgctacgacccgtattcgcaccgacac

SEQ ID NO: 981 - DNA, 127 bp, synthetic construct
  source 1..127: mol_type = other DNA
acatttgttgatacaaccataaaatgataattactcccataaattgataattatcacacccataaattgatattgcctctgatcatagtcagaccaacattgctacgacccgtattcgcaccgacac

SEQ ID NO: 982 - DNA, 127 bp, synthetic construct
  source 1..127: mol_type = other DNA
acatttgttgatacaaccataaaatgataattacgcccataaattgataattatcacacccataaattgatattgcctctgatcatagtcagaccaacattgctacgacccgtattcgcaccgacac

SEQ ID NO: 983 - DNA, 127 bp, synthetic construct
  source 1..127: mol_type = other DNA
acatttgttgatacaaccataaaatgataattacccccataaattgataattatcacacccataaattgatattgcctctgatcatagtcagaccaacattgctacgacccgtattcgcaccgacac

SEQ ID NO: 984 - DNA, 127 bp, synthetic construct
  source 1..127: mol_type = other DNA
acatttgttgatacaaccataaaatgataattaaacccataaattgataattatcacacccataaattgatattgcctctgatcatagtcagaccaacattgctacgacccgtattcgcaccgacac

SEQ ID NO: 985 - DNA, 127 bp, synthetic construct
  source 1..127: mol_type = other DNA
acatttgttgatacaaccataaaatgataattatacccataaattgataattatcacacccataaattgatattgcctctgatcatagtcagaccaacattgctacgacccgtattcgcaccgacac

SEQ ID NO: 986 - DNA, 127 bp, synthetic construct
  source 1..127: mol_type = other DNA
acatttgttgatacaaccataaaatgataattagacccataaattgataattatcacacccataaattgatattgcctctgatcatagtcagaccaacattgctacgacccgtattcgcaccgacac

SEQ ID NO: 987 - DNA, 127 bp, synthetic construct
  source 1..127: mol_type = other DNA
acatttgttgatacaaccataaaatgataatttcacccataaattgataattatcacacccataaattgatattgcctctgatcatagtcagaccaacattgctacgacccgtattcgcaccgacac

SEQ ID NO: 988 - DNA, 127 bp, synthetic construct
  source 1..127: mol_type = other DNA
acatttgttgatacaaccataaaatgataattgcacccataaattgataattatcacacccataaattgatattgcctctgatcatagtcagaccaacattgctacgacccgtattcgcaccgacac

SEQ ID NO: 989 - DNA, 127 bp, synthetic construct
  source 1..127: mol_type = other DNA
acatttgttgatacaaccataaaatgataattccacccataaattgataattatcacacccataaattgatattgcctctgatcatagtcagaccaacattgctacgacccgtattcgcaccgacac

SEQ ID NO: 990 - DNA, 127 bp, synthetic construct
  source 1..127: mol_type = other DNA
acatttgttgatacaaccataaaatgataataacacccataaattgataattatcacacccataaattgatattgcctctgatcatagtcagaccaacattgctacgacccgtattcgcaccgacac

SEQ ID NO: 991 - DNA, 127 bp, synthetic construct
  source 1..127: mol_type = other DNA
acatttgttgatacaaccataaaatgataatgacacccataaattgataattatcacacccataaattgatattgcctctgatcatagtcagaccaacattgctacgacccgtattcgcaccgacac

SEQ ID NO: 992 - DNA, 127 bp, synthetic construct
  source 1..127: mol_type = other DNA
acatttgttgatacaaccataaaatgataatcacacccataaattgataattatcacacccataaattgatattgcctctgatcatagtcagaccaacattgctacgacccgtattcgcaccgacac

SEQ ID NO: 993 - DNA, 127 bp, synthetic construct
  source 1..127: mol_type = other DNA
acatttgttgatacaaccataaaatgataaatacacccataaattgataattatcacacccataaattgatattgcctctgatcatagtcagaccaacattgctacgacccgtattcgcaccgacac

SEQ ID NO: 994 - DNA, 127 bp, synthetic construct
  source 1..127: mol_type = other DNA
acatttgttgatacaaccataaaatgataagtacacccataaattgataattatcacacccataaattgatattgcctctgatcatagtcagaccaacattgctacgacccgtattcgcaccgacac

SEQ ID NO: 995 - DNA, 127 bp, synthetic construct
  source 1..127: mol_type = other DNA
acatttgttgatacaaccataaaatgataactacacccataaattgataattatcacacccataaattgatattgcctctgatcatagtcagaccaacattgctacgacccgtattcgcaccgacac

SEQ ID NO: 996 - DNA, 127 bp, synthetic construct
  source 1..127: mol_type = other DNA
acatttgttgatacaaccataaaatgatatttacacccataaattgataattatcacacccataaattgatattgcctctgatcatagtcagaccaacattgctacgacccgtattcgcaccgacac

SEQ ID NO: 997 - DNA, 127 bp, synthetic construct
  source 1..127: mol_type = other DNA
acatttgttgatacaaccataaaatgatagttacacccataaattgataattatcacacccataaattgatattgcctctgatcatagtcagaccaacattgctacgacccgtattcgcaccgacac

SEQ ID NO: 998 - DNA, 127 bp, synthetic construct
  source 1..127: mol_type = other DNA
acatttgttgatacaaccataaaatgatacttacacccataaattgataattatcacacccataaattgatattgcctctgatcatagtcagaccaacattgctacgacccgtattcgcaccgacac

SEQ ID NO: 999 - DNA, 127 bp, synthetic construct
  source 1..127: mol_type = other DNA
acatttgttgatacaaccataaaatgattattacacccataaattgataattatcacacccataaattgatattgcctctgatcatagtcagaccaacattgctacgacccgtattcgcaccgacac

SEQ ID NO: 1000 - DNA, 127 bp, synthetic construct
  source 1..127: mol_type = other DNA
acatttgttgatacaaccataaaatgatgattacacccataaattgataattatcacacccataaattgatattgcctctgatcatagtcagaccaacattgctacgacccgtattcgcaccgacac

SEQ ID NO: 1001 - DNA, 127 bp, synthetic construct
  source 1..127: mol_type = other DNA
acatttgttgatacaaccataaaatgatcattacacccataaattgataattatcacacccataaattgatattgcctctgatcatagtcagaccaacattgctacgacccgtattcgcaccgacac

SEQ ID NO: 1002 - DNA, 127 bp, synthetic construct
  source 1..127: mol_type = other DNA
acatttgttgatacaaccataaaatgaaaattacacccataaattgataattatcacacccataaattgatattgcctctgatcatagtcagaccaacattgctacgacccgtattcgcaccgacac

SEQ ID NO: 1003 - DNA, 127 bp, synthetic construct
  source 1..127: mol_type = other DNA
acatttgttgatacaaccataaaatgagaattacacccataaattgataattatcacacccataaattgatattgcctctgatcatagtcagaccaacattgctacgacccgtattcgcaccgacac

SEQ ID NO: 1004 - DNA, 127 bp, synthetic construct
  source 1..127: mol_type = other DNA
acatttgttgatacaaccataaaatgacaattacacccataaattgataattatcacacccataaattgatattgcctctgatcatagtcagaccaacattgctacgacccgtattcgcaccgacac

SEQ ID NO: 1005 - DNA, 127 bp, synthetic construct
  source 1..127: mol_type = other DNA
acatttgttgatacaaccataaaatgttaattacacccataaattgataattatcacacccataaattgatattgcctctgatcatagtcagaccaacattgctacgacccgtattcgcaccgacac

SEQ ID NO: 1006 - DNA, 127 bp, synthetic construct
  source 1..127: mol_type = other DNA
acatttgttgatacaaccataaaatggtaattacacccataaattgataattatcacacccataaattgatattgcctctgatcatagtcagaccaacattgctacgacccgtattcgcaccgacac

SEQ ID NO: 1007 - DNA, 127 bp, synthetic construct
  source 1..127: mol_type = other DNA
acatttgttgatacaaccataaaatgctaattacacccataaattgataattatcacacccataaattgatattgcctctgatcatagtcagaccaacattgctacgacccgtattcgcaccgacac

SEQ ID NO: 1008 - DNA, 127 bp, synthetic construct
  source 1..127: mol_type = other DNA
acatttgttgatacaaccataaaataataattacacccataaattgataattatcacacccataaattgatattgcctctgatcatagtcagaccaacattgctacgacccgtattcgcaccgacac

SEQ ID NO: 1009 - DNA, 127 bp, synthetic construct
  source 1..127: mol_type = other DNA
acatttgttgatacaaccataaaattataattacacccataaattgataattatcacacccataaattgatattgcctctgatcatagtcagaccaacattgctacgacccgtattcgcaccgacac

SEQ ID NO: 1010 - DNA, 127 bp, synthetic construct
  source 1..127: mol_type = other DNA
acatttgttgatacaaccataaaatcataattacacccataaattgataattatcacacccataaattgatattgcctctgatcatagtcagaccaacattgctacgacccgtattcgcaccgacac

SEQ ID NO: 1011 - DNA, 127 bp, synthetic construct
  source 1..127: mol_type = other DNA
acatttgttgatacaaccataaaaagataattacacccataaattgataattatcacacccataaattgatattgcctctgatcatagtcagaccaacattgctacgacccgtattcgcaccgacac

SEQ ID NO: 1012 - DNA, 127 bp, synthetic construct
  source 1..127: mol_type = other DNA
acatttgttgatacaaccataaaaggataattacacccataaattgataattatcacacccataaattgatattgcctctgatcatagtcagaccaacattgctacgacccgtattcgcaccgacac

SEQ ID NO: 1013 - DNA, 127 bp, synthetic construct
  source 1..127: mol_type = other DNA
acatttgttgatacaaccataaaacgataattacacccataaattgataattatcacacccataaattgatattgcctctgatcatagtcagaccaacattgctacgacccgtattcgcaccgacac

SEQ ID NO: 1014 - DNA, 127 bp, synthetic construct
  source 1..127: mol_type = other DNA
acatttgttgatacaaccataaattgataattacacccataaattgataattatcacacccataaattgatattgcctctgatcatagtcagaccaacattgctacgacccgtattcgcaccgacac

SEQ ID NO: 1015 - DNA, 127 bp, synthetic construct
  source 1..127: mol_type = other DNA
acatttgttgatacaaccataaagtgataattacacccataaattgataattatcacacccataaattgatattgcctctgatcatagtcagaccaacattgctacgacccgtattcgcaccgacac

SEQ ID NO: 1016 - DNA, 127 bp, synthetic construct
  source 1..127: mol_type = other DNA
acatttgttgatacaaccataaactgataattacacccataaattgataattatcacacccataaattgatattgcctctgatcatagtcagaccaacattgctacgacccgtattcgcaccgacac

SEQ ID NO: 1017 - DNA, 127 bp, synthetic construct
  source 1..127: mol_type = other DNA
acatttgttgatacaaccataatatgataattacacccataaattgataattatcacacccataaattgatattgcctctgatcatagtcagaccaacattgctacgacccgtattcgcaccgacac

SEQ ID NO: 1018 - DNA, 127 bp, synthetic construct
  source 1..127: mol_type = other DNA
acatttgttgatacaaccataagatgataattacacccataaattgataattatcacacccataaattgatattgcctctgatcatagtcagaccaacattgctacgacccgtattcgcaccgacac

SEQ ID NO: 1019 - DNA, 127 bp, synthetic construct
  source 1..127: mol_type = other DNA
acatttgttgatacaaccataacatgataattacacccataaattgataattatcacacccataaattgatattgcctctgatcatagtcagaccaacattgctacgacccgtattcgcaccgacac

SEQ ID NO: 1020 - DNA, 127 bp, synthetic construct
  source 1..127: mol_type = other DNA
acatttgttgatacaaccatataatgataattacacccataaattgataattatcacacccataaattgatattgcctctgatcatagtcagaccaacattgctacgacccgtattcgcaccgacac

SEQ ID NO: 1021 - DNA, 127 bp, synthetic construct
  source 1..127: mol_type = other DNA
acatttgttgatacaaccatagaatgataattacacccataaattgataattatcacacccataaattgatattgcctctgatcatagtcagaccaacattgctacgacccgtattcgcaccgacac

SEQ ID NO: 1022 - DNA, 127 bp, synthetic construct
  source 1..127: mol_type = other DNA
acatttgttgatacaaccatacaatgataattacacccataaattgataattatcacacccataaattgatattgcctctgatcatagtcagaccaacattgctacgacccgtattcgcaccgacac

SEQ ID NO: 1023 - DNA, 127 bp, synthetic construct
  source 1..127: mol_type = other DNA
acatttgttgatacaaccattaaatgataattacacccataaattgataattatcacacccataaattgatattgcctctgatcatagtcagaccaacattgctacgacccgtattcgcaccgacac

SEQ ID NO: 1024 - DNA, 127 bp, synthetic construct
  source 1..127: mol_type = other DNA
acatttgttgatacaaccatgaaatgataattacacccataaattgataattatcacacccataaattgatattgcctctgatcatagtcagaccaacattgctacgacccgtattcgcaccgacac

SEQ ID NO: 1025 - DNA, 127 bp, synthetic construct
  source 1..127: mol_type = other DNA
acatttgttgatacaaccatcaaatgataattacacccataaattgataattatcacacccataaattgatattgcctctgatcatagtcagaccaacattgctacgacccgtattcgcaccgacac

SEQ ID NO: 1026 - DNA, 127 bp, synthetic construct
  source 1..127: mol_type = other DNA
acatttgttgatacaaccaaaaaatgataattacacccataaattgataattatcacacccataaattgatattgcctctgatcatagtcagaccaacattgctacgacccgtattcgcaccgacac

SEQ ID NO: 1027 - DNA, 127 bp, synthetic construct
  source 1..127: mol_type = other DNA
acatttgttgatacaaccagaaaatgataattacacccataaattgataattatcacacccataaattgatattgcctctgatcatagtcagaccaacattgctacgacccgtattcgcaccgacac

SEQ ID NO: 1028 - DNA, 127 bp, synthetic construct
  source 1..127: mol_type = other DNA
acatttgttgatacaaccacaaaatgataattacacccataaattgataattatcacacccataaattgatattgcctctgatcatagtcagaccaacattgctacgacccgtattcgcaccgacac

SEQ ID NO: 1029 - DNA, 127 bp, synthetic construct
  source 1..127: mol_type = other DNA
acatttgttgatacaaccttaaaatgataattacacccataaattgataattatcacacccataaattgatattgcctctgatcatagtcagaccaacattgctacgacccgtattcgcaccgacac

SEQ ID NO: 1030 - DNA, 127 bp, synthetic construct
  source 1..127: mol_type = other DNA
acatttgttgatacaaccgtaaaatgataattacacccataaattgataattatcacacccataaattgatattgcctctgatcatagtcagaccaacattgctacgacccgtattcgcaccgacac

SEQ ID NO: 1031 - DNA, 127 bp, synthetic construct
  source 1..127: mol_type = other DNA
acatttgttgatacaaccctaaaatgataattacacccataaattgataattatcacacccataaattgatattgcctctgatcatagtcagaccaacattgctacgacccgtattcgcaccgacac

SEQ ID NO: 1032 - DNA, 127 bp, synthetic construct
  source 1..127: mol_type = other DNA
acatttgttgatacaacaataaaatgataattacacccataaattgataattatcacacccataaattgatattgcctctgatcatagtcagaccaacattgctacgacccgtattcgcaccgacac

SEQ ID NO: 1033 - DNA, 127 bp, synthetic construct
  source 1..127: mol_type = other DNA
acatttgttgatacaactataaaatgataattacacccataaattgataattatcacacccataaattgatattgcctctgatcatagtcagaccaacattgctacgacccgtattcgcaccgacac

SEQ ID NO: 1034 - DNA, 127 bp, synthetic construct
  source 1..127: mol_type = other DNA
acatttgttgatacaacgataaaatgataattacacccataaattgataattatcacacccataaattgatattgcctctgatcatagtcagaccaacattgctacgacccgtattcgcaccgacac

SEQ ID NO: 1035 - DNA, 127 bp, synthetic construct
  source 1..127: mol_type = other DNA
acatttgttgatacaaacataaaatgataattacacccataaattgataattatcacacccataaattgatattgcctctgatcatagtcagaccaacattgctacgacccgtattcgcaccgacac

SEQ ID NO: 1036 - DNA, 127 bp, synthetic construct
  source 1..127: mol_type = other DNA
acatttgttgatacaatcataaaatgataattacacccataaattgataattatcacacccataaattgatattgcctctgatcatagtcagaccaacattgctacgacccgtattcgcaccgacac

SEQ ID NO: 1037 - DNA, 127 bp, synthetic construct
  source 1..127: mol_type = other DNA
acatttgttgatacaagcataaaatgataattacacccataaattgataattatcacacccataaattgatattgcctctgatcatagtcagaccaacattgctacgacccgtattcgcaccgacac

SEQ ID NO: 1038 - DNA, 127 bp, synthetic construct
  source 1..127: mol_type = other DNA
acatttgttgatacatccataaaatgataattacacccataaattgataattatcacacccataaattgatattgcctctgatcatagtcagaccaacattgctacgacccgtattcgcaccgacac

SEQ ID NO: 1039 - DNA, 127 bp, synthetic construct
  source 1..127: mol_type = other DNA
acatttgttgatacagccataaaatgataattacacccataaattgataattatcacacccataaattgatattgcctctgatcatagtcagaccaacattgctacgacccgtattcgcaccgacac

SEQ ID NO: 1040 - DNA, 127 bp, synthetic construct
  source 1..127: mol_type = other DNA
acatttgttgatacacccataaaatgataattacacccataaattgataattatcacacccataaattgatattgcctctgatcatagtcagaccaacattgctacgacccgtattcgcaccgacac

SEQ ID NO: 1041 - DNA, 127 bp, synthetic construct
  source 1..127: mol_type = other DNA
acatttgttgatactaccataaaatgataattacacccataaattgataattatcacacccataaattgatattgcctctgatcatagtcagaccaacattgctacgacccgtattcgcaccgacac

SEQ ID NO: 1042 - DNA, 127 bp, synthetic construct
  source 1..127: mol_type = other DNA
acatttgttgatacgaccataaaatgataattacacccataaattgataattatcacacccataaattgatattgcctctgatcatagtcagaccaacattgctacgacccgtattcgcaccgacac

SEQ ID NO: 1043 - DNA, 127 bp, synthetic construct
  source 1..127: mol_type = other DNA
acatttgttgataccaccataaaatgataattacacccataaattgataattatcacacccataaattgatattgcctctgatcatagtcagaccaacattgctacgacccgtattcgcaccgacac

SEQ ID NO: 1044 - DNA, 127 bp, synthetic construct
  source 1..127: mol_type = other DNA
acatttgttgataaaaccataaaatgataattacacccataaattgataattatcacacccataaattgatattgcctctgatcatagtcagaccaacattgctacgacccgtattcgcaccgacac

SEQ ID NO: 1045 - DNA, 127 bp, synthetic construct
  source 1..127: mol_type = other DNA
acatttgttgatataaccataaaatgataattacacccataaattgataattatcacacccataaattgatattgcctctgatcatagtcagaccaacattgctacgacccgtattcgcaccgacac

SEQ ID NO: 1046 - DNA, 127 bp, synthetic construct
  source 1..127: mol_type = other DNA
acatttgttgatagaaccataaaatgataattacacccataaattgataattatcacacccataaattgatattgcctctgatcatagtcagaccaacattgctacgacccgtattcgcaccgacac

SEQ ID NO: 1047 - DNA, 127 bp, synthetic construct
  source 1..127: mol_type = other DNA
acatttgttgattcaaccataaaatgataattacacccataaattgataattatcacacccataaattgatattgcctctgatcatagtcagaccaacattgctacgacccgtattcgcaccgacac

SEQ ID NO: 1048 - DNA, 127 bp, synthetic construct
  source 1..127: mol_type = other DNA
acatttgttgatgcaaccataaaatgataattacacccataaattgataattatcacacccataaattgatattgcctctgatcatagtcagaccaacattgctacgacccgtattcgcaccgacac

SEQ ID NO: 1049 - DNA, 127 bp, synthetic construct
  source 1..127: mol_type = other DNA
acatttgttgatccaaccataaaatgataattacacccataaattgataattatcacacccataaattgatattgcctctgatcatagtcagaccaacattgctacgacccgtattcgcaccgacac

SEQ ID NO: 1050 - DNA, 127 bp, synthetic construct
  source 1..127: mol_type = other DNA
acatttgttgaaacaaccataaaatgataattacacccataaattgataattatcacacccataaattgatattgcctctgatcatagtcagaccaacattgctacgacccgtattcgcaccgacac

SEQ ID NO: 1051 - DNA, 127 bp, synthetic construct
  source 1..127: mol_type = other DNA
acatttgttgagacaaccataaaatgataattacacccataaattgataattatcacacccataaattgatattgcctctgatcatagtcagaccaacattgctacgacccgtattcgcaccgacac

SEQ ID NO: 1052 - DNA, 127 bp, synthetic construct
  source 1..127: mol_type = other DNA
acatttgttgacacaaccataaaatgataattacacccataaattgataattatcacacccataaattgatattgcctctgatcatagtcagaccaacattgctacgacccgtattcgcaccgacac

SEQ ID NO: 1053 - DNA, 127 bp, synthetic construct
  source 1..127: mol_type = other DNA
acatttgttgttacaaccataaaatgataattacacccataaattgataattatcacacccataaattgatattgcctctgatcatagtcagaccaacattgctacgacccgtattcgcaccgacac

SEQ ID NO: 1054 - DNA, 127 bp, synthetic construct
  source 1..127: mol_type = other DNA
acatttgttggtacaaccataaaatgataattacacccataaattgataattatcacacccataaattgatattgcctctgatcatagtcagaccaacattgctacgacccgtattcgcaccgacac

SEQ ID NO: 1055 - DNA, 127 bp, synthetic construct
  source 1..127: mol_type = other DNA
acatttgttgctacaaccataaaatgataattacacccataaattgataattatcacacccataaattgatattgcctctgatcatagtcagaccaacattgctacgacccgtattcgcaccgacac

SEQ ID NO: 1056 - DNA, 127 bp, synthetic construct
  source 1..127: mol_type = other DNA
acatttgttaatacaaccataaaatgataattacacccataaattgataattatcacacccataaattgatattgcctctgatcatagtcagaccaacattgctacgacccgtattcgcaccgacac

SEQ ID NO: 1057 - DNA, 127 bp, synthetic construct
  source 1..127: mol_type = other DNA
acatttgtttatacaaccataaaatgataattacacccataaattgataattatcacacccataaattgatattgcctctgatcatagtcagaccaacattgctacgacccgtattcgcaccgacac

SEQ ID NO: 1058 - DNA, 127 bp, synthetic construct
  source 1..127: mol_type = other DNA
acatttgttcatacaaccataaaatgataattacacccataaattgataattatcacacccataaattgatattgcctctgatcatagtcagaccaacattgctacgacccgtattcgcaccgacac

SEQ ID NO: 1059 - DNA, 127 bp, synthetic construct
  source 1..127: mol_type = other DNA
acatttgtagatacaaccataaaatgataattacacccataaattgataattatcacacccataaattgatattgcctctgatcatagtcagaccaacattgctacgacccgtattcgcaccgacac

SEQ ID NO: 1060 - DNA, 127 bp, synthetic construct
  source 1..127: mol_type = other DNA
acatttgtggatacaaccataaaatgataattacacccataaattgataattatcacacccataaattgatattgcctctgatcatagtcagaccaacattgctacgacccgtattcgcaccgacac

SEQ ID NO: 1061 - DNA, 127 bp, synthetic construct
  source 1..127: mol_type = other DNA
acatttgtcgatacaaccataaaatgataattacacccataaattgataattatcacacccataaattgatattgcctctgatcatagtcagaccaacattgctacgacccgtattcgcaccgacac

SEQ ID NO: 1062 - DNA, 127 bp, synthetic construct
  source 1..127: mol_type = other DNA
acatttgatgatacaaccataaaatgataattacacccataaattgataattatcacacccataaattgatattgcctctgatcatagtcagaccaacattgctacgacccgtattcgcaccgacac

SEQ ID NO: 1063 - DNA, 127 bp, synthetic construct
  source 1..127: mol_type = other DNA
acatttggtgatacaaccataaaatgataattacacccataaattgataattatcacacccataaattgatattgcctctgatcatagtcagaccaacattgctacgacccgtattcgcaccgacac

SEQ ID NO: 1064 - DNA, 127 bp, synthetic construct
  source 1..127: mol_type = other DNA
acatttgctgatacaaccataaaatgataattacacccataaattgataattatcacacccataaattgatattgcctctgatcatagtcagaccaacattgctacgacccgtattcgcaccgacac

SEQ ID NO: 1065 - DNA, 127 bp, synthetic construct
  source 1..127: mol_type = other DNA
acatttattgatacaaccataaaatgataattacacccataaattgataattatcacacccataaattgatattgcctctgatcatagtcagaccaacattgctacgacccgtattcgcaccgacac

SEQ ID NO: 1066 - DNA, 127 bp, synthetic construct
  source 1..127: mol_type = other DNA
acattttttgatacaaccataaaatgataattacacccataaattgataattatcacacccataaattgatattgcctctgatcatagtcagaccaacattgctacgacccgtattcgcaccgacac

SEQ ID NO: 1067 - DNA, 127 bp, synthetic construct
  source 1..127: mol_type = other DNA
acatttcttgatacaaccataaaatgataattacacccataaattgataattatcacacccataaattgatattgcctctgatcatagtcagaccaacattgctacgacccgtattcgcaccgacac

SEQ ID NO: 1068 - DNA, 127 bp, synthetic construct
  source 1..127: mol_type = other DNA
acattagttgatacaaccataaaatgataattacacccataaattgataattatcacacccataaattgatattgcctctgatcatagtcagaccaacattgctacgacccgtattcgcaccgacac

SEQ ID NO: 1069 - DNA, 127 bp, synthetic construct
  source 1..127: mol_type = other DNA
acattggttgatacaaccataaaatgataattacacccataaattgataattatcacacccataaattgatattgcctctgatcatagtcagaccaacattgctacgacccgtattcgcaccgacac

SEQ ID NO: 1070 - DNA, 127 bp, synthetic construct
  source 1..127: mol_type = other DNA
acattcgttgatacaaccataaaatgataattacacccataaattgataattatcacacccataaattgatattgcctctgatcatagtcagaccaacattgctacgacccgtattcgcaccgacac

SEQ ID NO: 1071 - DNA, 127 bp, synthetic construct
  source 1..127: mol_type = other DNA
acatatgttgatacaaccataaaatgataattacacccataaattgataattatcacacccataaattgatattgcctctgatcatagtcagaccaacattgctacgacccgtattcgcaccgacac

SEQ ID NO: 1072 - DNA, 127 bp, synthetic construct
  source 1..127: mol_type = other DNA
acatgtgttgatacaaccataaaatgataattacacccataaattgataattatcacacccataaattgatattgcctctgatcatagtcagaccaacattgctacgacccgtattcgcaccgacac

SEQ ID NO: 1073 - DNA, 127 bp, synthetic construct
  source 1..127: mol_type = other DNA
acatctgttgatacaaccataaaatgataattacacccataaattgataattatcacacccataaattgatattgcctctgatcatagtcagaccaacattgctacgacccgtattcgcaccgacac

SEQ ID NO: 1074 - DNA, 127 bp, synthetic construct
  source 1..127: mol_type = other DNA
acaattgttgatacaaccataaaatgataattacacccataaattgataattatcacacccataaattgatattgcctctgatcatagtcagaccaacattgctacgacccgtattcgcaccgacac

SEQ ID NO: 1075 - DNA, 127 bp, synthetic construct
  source 1..127: mol_type = other DNA
acagttgttgatacaaccataaaatgataattacacccataaattgataattatcacacccataaattgatattgcctctgatcatagtcagaccaacattgctacgacccgtattcgcaccgacac

SEQ ID NO: 1076 - DNA, 127 bp, synthetic construct
  source 1..127: mol_type = other DNA
acacttgttgatacaaccataaaatgataattacacccataaattgataattatcacacccataaattgatattgcctctgatcatagtcagaccaacattgctacgacccgtattcgcaccgacac

SEQ ID NO: 1077 - DNA, 127 bp, synthetic construct
  source 1..127: mol_type = other DNA
acttttgttgatacaaccataaaatgataattacacccataaattgataattatcacacccataaattgatattgcctctgatcatagtcagaccaacattgctacgacccgtattcgcaccgacac

SEQ ID NO: 1078 - DNA, 127 bp, synthetic construct
  source 1..127: mol_type = other DNA
acgtttgttgatacaaccataaaatgataattacacccataaattgataattatcacacccataaattgatattgcctctgatcatagtcagaccaacattgctacgacccgtattcgcaccgacac

SEQ ID NO: 1079 - DNA, 127 bp, synthetic construct
  source 1..127: mol_type = other DNA
acctttgttgatacaaccataaaatgataattacacccataaattgataattatcacacccataaattgatattgcctctgatcatagtcagaccaacattgctacgacccgtattcgcaccgacac

SEQ ID NO: 1080 - DNA, 127 bp, synthetic construct
  source 1..127: mol_type = other DNA
aaatttgttgatacaaccataaaatgataattacacccataaattgataattatcacacccataaattgatattgcctctgatcatagtcagaccaacattgctacgacccgtattcgcaccgacac

SEQ ID NO: 1081 - DNA, 127 bp, synthetic construct
  source 1..127: mol_type = other DNA
atatttgttgatacaaccataaaatgataattacacccataaattgataattatcacacccataaattgatattgcctctgatcatagtcagaccaacattgctacgacccgtattcgcaccgacac

SEQ ID NO: 1082 - DNA, 127 bp, synthetic construct
  source 1..127: mol_type = other DNA
agatttgttgatacaaccataaaatgataattacacccataaattgataattatcacacccataaattgatattgcctctgatcatagtcagaccaacattgctacgacccgtattcgcaccgacac

SEQ ID NO: 1083 - DNA, 127 bp, synthetic construct
  source 1..127: mol_type = other DNA
tcatttgttgatacaaccataaaatgataattacacccataaattgataattatcacacccataaattgatattgcctctgatcatagtcagaccaacattgctacgacccgtattcgcaccgacac

SEQ ID NO: 1084 - DNA, 127 bp, synthetic construct
  source 1..127: mol_type = other DNA
gcatttgttgatacaaccataaaatgataattacacccataaattgataattatcacacccataaattgatattgcctctgatcatagtcagaccaacattgctacgacccgtattcgcaccgacac

SEQ ID NO: 1085 - DNA, 127 bp, synthetic construct
  source 1..127: mol_type = other DNA
ccatttgttgatacaaccataaaatgataattacacccataaattgataattatcacacccataaattgatattgcctctgatcatagtcagaccaacattgctacgacccgtattcgcaccgacac

SEQ ID NO: 1086 - DNA, 127 bp, synthetic construct
  source 1..127: mol_type = other DNA
acatttgttgatacaaccataaaatgataattacacccataaattgataattatcacacccataaattgatattgcctaggatcatagtcagaccaacattgctacgacccgtattcgcaccgacac

SEQ ID NO: 1087 - DNA, 127 bp, synthetic construct
  source 1..127: mol_type = other DNA
acatttgttgatacaaccataaaatgataattacacccataaattgataattatcacacccataaattgatattgccgatgatcatagtcagaccaacattgctacgacccgtattcgcaccgacac

SEQ ID NO: 1088 - DNA, 127 bp, synthetic construct
  source 1..127: mol_type = other DNA
acatttgttgatacaaccataaaatgataattacacccataaattgataattatcacacccataaattgatattgcagctgatcatagtcagaccaacattgctacgacccgtattcgcaccgacac

SEQ ID NO: 1089 - DNA, 127 bp, synthetic construct
  source 1..127: mol_type = other DNA
acatttgttgatacaaccataaaatgataattacacccataaattgataattatcacacccataaattgatattgaatctgatcatagtcagaccaacattgctacgacccgtattcgcaccgacac

SEQ ID NO: 1090 - DNA, 127 bp, synthetic construct
  source 1..127: mol_type = other DNA
acatttgttgatacaaccataaaatgataattacacccataaattgataattatcacacccataaattgatatttactctgatcatagtcagaccaacattgctacgacccgtattcgcaccgacac

SEQ ID NO: 1091 - DNA, 127 bp, synthetic construct
  source 1..127: mol_type = other DNA
acatttgttgatacaaccataaaatgataattacacccataaattgataattatcacacccataaattgatatgtcctctgatcatagtcagaccaacattgctacgacccgtattcgcaccgacac

SEQ ID NO: 1092 - DNA, 127 bp, synthetic construct
  source 1..127: mol_type = other DNA
acatttgttgatacaaccataaaatgataattacacccataaattgataattatcacacccataaattgatagggcctctgatcatagtcagaccaacattgctacgacccgtattcgcaccgacac

SEQ ID NO: 1093 - DNA, 127 bp, synthetic construct
  source 1..127: mol_type = other DNA
acatttgttgatacaaccataaaatgataattacacccataaattgataattatcacacccataaattgatcgtgcctctgatcatagtcagaccaacattgctacgacccgtattcgcaccgacac

SEQ ID NO: 1094 - DNA, 127 bp, synthetic construct
  source 1..127: mol_type = other DNA
acatttgttgatacaaccataaaatgataattacacccataaattgataattatcacacccataaattgagcttgcctctgatcatagtcagaccaacattgctacgacccgtattcgcaccgacac

SEQ ID NO: 1095 - DNA, 127 bp, synthetic construct
  source 1..127: mol_type = other DNA
acatttgttgatacaaccataaaatgataattacacccataaattgataattatcacacccataaattgcgattgcctctgatcatagtcagaccaacattgctacgacccgtattcgcaccgacac

SEQ ID NO: 1096 - DNA, 127 bp, synthetic construct
  source 1..127: mol_type = other DNA
acatttgttgatacaaccataaaatgataattacacccataaattgataattatcacacccataaatttctattgcctctgatcatagtcagaccaacattgctacgacccgtattcgcaccgacac

SEQ ID NO: 1097 - DNA, 127 bp, synthetic construct
  source 1..127: mol_type = other DNA
acatttgttgatacaaccataaaatgataattacacccataaattgataattatcacacccataaatgtatattgcctctgatcatagtcagaccaacattgctacgacccgtattcgcaccgacac

SEQ ID NO: 1098 - DNA, 127 bp, synthetic construct
  source 1..127: mol_type = other DNA
acatttgttgatacaaccataaaatgataattacacccataaattgataattatcacacccataaagggatattgcctctgatcatagtcagaccaacattgctacgacccgtattcgcaccgacac

SEQ ID NO: 1099 - DNA, 127 bp, synthetic construct
  source 1..127: mol_type = other DNA
acatttgttgatacaaccataaaatgataattacacccataaattgataattatcacacccataacgtgatattgcctctgatcatagtcagaccaacattgctacgacccgtattcgcaccgacac

SEQ ID NO: 1100 - DNA, 127 bp, synthetic construct
  source 1..127: mol_type = other DNA
acatttgttgatacaaccataaaatgataattacacccataaattgataattatcacacccataccttgatattgcctctgatcatagtcagaccaacattgctacgacccgtattcgcaccgacac

SEQ ID NO: 1101 - DNA, 127 bp, synthetic construct
  source 1..127: mol_type = other DNA
acatttgttgatacaaccataaaatgataattacacccataaattgataattatcacacccatccattgatattgcctctgatcatagtcagaccaacattgctacgacccgtattcgcaccgacac

SEQ ID NO: 1102 - DNA, 127 bp, synthetic construct
  source 1..127: mol_type = other DNA
acatttgttgatacaaccataaaatgataattacacccataaattgataattatcacacccagcaattgatattgcctctgatcatagtcagaccaacattgctacgacccgtattcgcaccgacac

SEQ ID NO: 1103 - DNA, 127 bp, synthetic construct
  source 1..127: mol_type = other DNA
acatttgttgatacaaccataaaatgataattacacccataaattgataattatcacaccccgaaattgatattgcctctgatcatagtcagaccaacattgctacgacccgtattcgcaccgacac

SEQ ID NO: 1104 - DNA, 127 bp, synthetic construct
  source 1..127: mol_type = other DNA
acatttgttgatacaaccataaaatgataattacacccataaattgataattatcacaccactaaattgatattgcctctgatcatagtcagaccaacattgctacgacccgtattcgcaccgacac

SEQ ID NO: 1105 - DNA, 127 bp, synthetic construct
  source 1..127: mol_type = other DNA
acatttgttgatacaaccataaaatgataattacacccataaattgataattatcacacaaataaattgatattgcctctgatcatagtcagaccaacattgctacgacccgtattcgcaccgacac

SEQ ID NO: 1106 - DNA, 127 bp, synthetic construct
  source 1..127: mol_type = other DNA
acatttgttgatacaaccataaaatgataattacacccataaattgataattatcacaaacataaattgatattgcctctgatcatagtcagaccaacattgctacgacccgtattcgcaccgacac

SEQ ID NO: 1107 - DNA, 127 bp, synthetic construct
  source 1..127: mol_type = other DNA
acatttgttgatacaaccataaaatgataattacacccataaattgataattatcaccaccataaattgatattgcctctgatcatagtcagaccaacattgctacgacccgtattcgcaccgacac

SEQ ID NO: 1108 - DNA, 127 bp, synthetic construct
  source 1..127: mol_type = other DNA
acatttgttgatacaaccataaaatgataattacacccataaattgataattatcaaccccataaattgatattgcctctgatcatagtcagaccaacattgctacgacccgtattcgcaccgacac

SEQ ID NO: 1109 - DNA, 127 bp, synthetic construct
  source 1..127: mol_type = other DNA
acatttgttgatacaaccataaaatgataattacacccataaattgataattatccaacccataaattgatattgcctctgatcatagtcagaccaacattgctacgacccgtattcgcaccgacac

SEQ ID NO: 1110 - DNA, 127 bp, synthetic construct
  source 1..127: mol_type = other DNA
acatttgttgatacaaccataaaatgataattacacccataaattgataattataccacccataaattgatattgcctctgatcatagtcagaccaacattgctacgacccgtattcgcaccgacac

SEQ ID NO: 1111 - DNA, 127 bp, synthetic construct
  source 1..127: mol_type = other DNA
acatttgttgatacaaccataaaatgataattacacccataaattgataattagaacacccataaattgatattgcctctgatcatagtcagaccaacattgctacgacccgtattcgcaccgacac

SEQ ID NO: 1112 - DNA, 127 bp, synthetic construct
  source 1..127: mol_type = other DNA
acatttgttgatacaaccataaaatgataattacacccataaattgataattcgcacacccataaattgatattgcctctgatcatagtcagaccaacattgctacgacccgtattcgcaccgacac

SEQ ID NO: 1113 - DNA, 127 bp, synthetic construct
  source 1..127: mol_type = other DNA
acatttgttgatacaaccataaaatgataattacacccataaattgataatgctcacacccataaattgatattgcctctgatcatagtcagaccaacattgctacgacccgtattcgcaccgacac

SEQ ID NO: 1114 - DNA, 127 bp, synthetic construct
  source 1..127: mol_type = other DNA
acatttgttgatacaaccataaaatgataattacacccataaattgataaggatcacacccataaattgatattgcctctgatcatagtcagaccaacattgctacgacccgtattcgcaccgacac

SEQ ID NO: 1115 - DNA, 127 bp, synthetic construct
  source 1..127: mol_type = other DNA
acatttgttgatacaaccataaaatgataattacacccataaattgatacgtatcacacccataaattgatattgcctctgatcatagtcagaccaacattgctacgacccgtattcgcaccgacac

SEQ ID NO: 1116 - DNA, 127 bp, synthetic construct
  source 1..127: mol_type = other DNA
acatttgttgatacaaccataaaatgataattacacccataaattgatccttatcacacccataaattgatattgcctctgatcatagtcagaccaacattgctacgacccgtattcgcaccgacac

SEQ ID NO: 1117 - DNA, 127 bp, synthetic construct
  source 1..127: mol_type = other DNA
acatttgttgatacaaccataaaatgataattacacccataaattgagcattatcacacccataaattgatattgcctctgatcatagtcagaccaacattgctacgacccgtattcgcaccgacac

SEQ ID NO: 1118 - DNA, 127 bp, synthetic construct
  source 1..127: mol_type = other DNA
acatttgttgatacaaccataaaatgataattacacccataaattgcgaattatcacacccataaattgatattgcctctgatcatagtcagaccaacattgctacgacccgtattcgcaccgacac

SEQ ID NO: 1119 - DNA, 127 bp, synthetic construct
  source 1..127: mol_type = other DNA
acatttgttgatacaaccataaaatgataattacacccataaatttctaattatcacacccataaattgatattgcctctgatcatagtcagaccaacattgctacgacccgtattcgcaccgacac

SEQ ID NO: 1120 - DNA, 127 bp, synthetic construct
  source 1..127: mol_type = other DNA
acatttgttgatacaaccataaaatgataattacacccataaatgtataattatcacacccataaattgatattgcctctgatcatagtcagaccaacattgctacgacccgtattcgcaccgacac

SEQ ID NO: 1121 - DNA, 127 bp, synthetic construct
  source 1..127: mol_type = other DNA
acatttgttgatacaaccataaaatgataattacacccataaagggataattatcacacccataaattgatattgcctctgatcatagtcagaccaacattgctacgacccgtattcgcaccgacac

SEQ ID NO: 1122 - DNA, 127 bp, synthetic construct
  source 1..127: mol_type = other DNA
acatttgttgatacaaccataaaatgataattacacccataacgtgataattatcacacccataaattgatattgcctctgatcatagtcagaccaacattgctacgacccgtattcgcaccgacac

SEQ ID NO: 1123 - DNA, 127 bp, synthetic construct
  source 1..127: mol_type = other DNA
acatttgttgatacaaccataaaatgataattacacccataccttgataattatcacacccataaattgatattgcctctgatcatagtcagaccaacattgctacgacccgtattcgcaccgacac

SEQ ID NO: 1124 - DNA, 127 bp, synthetic construct
  source 1..127: mol_type = other DNA
acatttgttgatacaaccataaaatgataattacacccatccattgataattatcacacccataaattgatattgcctctgatcatagtcagaccaacattgctacgacccgtattcgcaccgacac

SEQ ID NO: 1125 - DNA, 127 bp, synthetic construct
  source 1..127: mol_type = other DNA
acatttgttgatacaaccataaaatgataattacacccagcaattgataattatcacacccataaattgatattgcctctgatcatagtcagaccaacattgctacgacccgtattcgcaccgacac

SEQ ID NO: 1126 - DNA, 127 bp, synthetic construct
  source 1..127: mol_type = other DNA
acatttgttgatacaaccataaaatgataattacaccccgaaattgataattatcacacccataaattgatattgcctctgatcatagtcagaccaacattgctacgacccgtattcgcaccgacac

SEQ ID NO: 1127 - DNA, 127 bp, synthetic construct
  source 1..127: mol_type = other DNA
acatttgttgatacaaccataaaatgataattacaccactaaattgataattatcacacccataaattgatattgcctctgatcatagtcagaccaacattgctacgacccgtattcgcaccgacac

SEQ ID NO: 1128 - DNA, 127 bp, synthetic construct
  source 1..127: mol_type = other DNA
acatttgttgatacaaccataaaatgataattacacaaataaattgataattatcacacccataaattgatattgcctctgatcatagtcagaccaacattgctacgacccgtattcgcaccgacac

SEQ ID NO: 1129 - DNA, 127 bp, synthetic construct
  source 1..127: mol_type = other DNA
acatttgttgatacaaccataaaatgataattacaaacataaattgataattatcacacccataaattgatattgcctctgatcatagtcagaccaacattgctacgacccgtattcgcaccgacac

SEQ ID NO: 1130 - DNA, 127 bp, synthetic construct
  source 1..127: mol_type = other DNA
acatttgttgatacaaccataaaatgataattaccaccataaattgataattatcacacccataaattgatattgcctctgatcatagtcagaccaacattgctacgacccgtattcgcaccgacac

SEQ ID NO: 1131 - DNA, 127 bp, synthetic construct
  source 1..127: mol_type = other DNA
acatttgttgatacaaccataaaatgataattaaccccataaattgataattatcacacccataaattgatattgcctctgatcatagtcagaccaacattgctacgacccgtattcgcaccgacac

SEQ ID NO: 1132 - DNA, 127 bp, synthetic construct
  source 1..127: mol_type = other DNA
acatttgttgatacaaccataaaatgataattcaacccataaattgataattatcacacccataaattgatattgcctctgatcatagtcagaccaacattgctacgacccgtattcgcaccgacac

SEQ ID NO: 1133 - DNA, 127 bp, synthetic construct
  source 1..127: mol_type = other DNA
acatttgttgatacaaccataaaatgataatgccacccataaattgataattatcacacccataaattgatattgcctctgatcatagtcagaccaacattgctacgacccgtattcgcaccgacac

SEQ ID NO: 1134 - DNA, 127 bp, synthetic construct
  source 1..127: mol_type = other DNA
acatttgttgatacaaccataaaatgataaggacacccataaattgataattatcacacccataaattgatattgcctctgatcatagtcagaccaacattgctacgacccgtattcgcaccgacac

SEQ ID NO: 1135 - DNA, 127 bp, synthetic construct
  source 1..127: mol_type = other DNA
acatttgttgatacaaccataaaatgatacgtacacccataaattgataattatcacacccataaattgatattgcctctgatcatagtcagaccaacattgctacgacccgtattcgcaccgacac

SEQ ID NO: 1136 - DNA, 127 bp, synthetic construct
  source 1..127: mol_type = other DNA
acatttgttgatacaaccataaaatgatccttacacccataaattgataattatcacacccataaattgatattgcctctgatcatagtcagaccaacattgctacgacccgtattcgcaccgacac

SEQ ID NO: 1137 - DNA, 127 bp, synthetic construct
  source 1..127: mol_type = other DNA
acatttgttgatacaaccataaaatgagcattacacccataaattgataattatcacacccataaattgatattgcctctgatcatagtcagaccaacattgctacgacccgtattcgcaccgacac

SEQ ID NO: 1138 - DNA, 127 bp, synthetic construct
  source 1..127: mol_type = other DNA
acatttgttgatacaaccataaaatgcgaattacacccataaattgataattatcacacccataaattgatattgcctctgatcatagtcagaccaacattgctacgacccgtattcgcaccgacac

SEQ ID NO: 1139 - DNA, 127 bp, synthetic construct
  source 1..127: mol_type = other DNA
acatttgttgatacaaccataaaattctaattacacccataaattgataattatcacacccataaattgatattgcctctgatcatagtcagaccaacattgctacgacccgtattcgcaccgacac

SEQ ID NO: 1140 - DNA, 127 bp, synthetic construct
  source 1..127: mol_type = other DNA
acatttgttgatacaaccataaaagtataattacacccataaattgataattatcacacccataaattgatattgcctctgatcatagtcagaccaacattgctacgacccgtattcgcaccgacac

SEQ ID NO: 1141 - DNA, 127 bp, synthetic construct
  source 1..127: mol_type = other DNA
acatttgttgatacaaccataaacggataattacacccataaattgataattatcacacccataaattgatattgcctctgatcatagtcagaccaacattgctacgacccgtattcgcaccgacac

SEQ ID NO: 1142 - DNA, 127 bp, synthetic construct
  source 1..127: mol_type = other DNA
acatttgttgatacaaccataacctgataattacacccataaattgataattatcacacccataaattgatattgcctctgatcatagtcagaccaacattgctacgacccgtattcgcaccgacac

SEQ ID NO: 1143 - DNA, 127 bp, synthetic construct
  source 1..127: mol_type = other DNA
acatttgttgatacaaccataccatgataattacacccataaattgataattatcacacccataaattgatattgcctctgatcatagtcagaccaacattgctacgacccgtattcgcaccgacac

SEQ ID NO: 1144 - DNA, 127 bp, synthetic construct
  source 1..127: mol_type = other DNA
acatttgttgatacaaccatccaatgataattacacccataaattgataattatcacacccataaattgatattgcctctgatcatagtcagaccaacattgctacgacccgtattcgcaccgacac

SEQ ID NO: 1145 - DNA, 127 bp, synthetic construct
  source 1..127: mol_type = other DNA
acatttgttgatacaaccagcaaatgataattacacccataaattgataattatcacacccataaattgatattgcctctgatcatagtcagaccaacattgctacgacccgtattcgcaccgacac

SEQ ID NO: 1146 - DNA, 127 bp, synthetic construct
  source 1..127: mol_type = other DNA
acatttgttgatacaacccgaaaatgataattacacccataaattgataattatcacacccataaattgatattgcctctgatcatagtcagaccaacattgctacgacccgtattcgcaccgacac

SEQ ID NO: 1147 - DNA, 127 bp, synthetic construct
  source 1..127: mol_type = other DNA
acatttgttgatacaacactaaaatgataattacacccataaattgataattatcacacccataaattgatattgcctctgatcatagtcagaccaacattgctacgacccgtattcgcaccgacac

SEQ ID NO: 1148 - DNA, 127 bp, synthetic construct
  source 1..127: mol_type = other DNA
acatttgttgatacaaaaataaaatgataattacacccataaattgataattatcacacccataaattgatattgcctctgatcatagtcagaccaacattgctacgacccgtattcgcaccgacac

SEQ ID NO: 1149 - DNA, 127 bp, synthetic construct
  source 1..127: mol_type = other DNA
acatttgttgatacacacataaaatgataattacacccataaattgataattatcacacccataaattgatattgcctctgatcatagtcagaccaacattgctacgacccgtattcgcaccgacac

SEQ ID NO: 1150 - DNA, 127 bp, synthetic construct
  source 1..127: mol_type = other DNA
acatttgttgatacccccataaaatgataattacacccataaattgataattatcacacccataaattgatattgcctctgatcatagtcagaccaacattgctacgacccgtattcgcaccgacac

SEQ ID NO: 1151 - DNA, 127 bp, synthetic construct
  source 1..127: mol_type = other DNA
acatttgttgataacaccataaaatgataattacacccataaattgataattatcacacccataaattgatattgcctctgatcatagtcagaccaacattgctacgacccgtattcgcaccgacac

SEQ ID NO: 1152 - DNA, 127 bp, synthetic construct
  source 1..127: mol_type = other DNA
acatttgttgatcaaaccataaaatgataattacacccataaattgataattatcacacccataaattgatattgcctctgatcatagtcagaccaacattgctacgacccgtattcgcaccgacac

SEQ ID NO: 1153 - DNA, 127 bp, synthetic construct
  source 1..127: mol_type = other DNA
acatttgttgagccaaccataaaatgataattacacccataaattgataattatcacacccataaattgatattgcctctgatcatagtcagaccaacattgctacgacccgtattcgcaccgacac

SEQ ID NO: 1154 - DNA, 127 bp, synthetic construct
  source 1..127: mol_type = other DNA
acatttgttgcgacaaccataaaatgataattacacccataaattgataattatcacacccataaattgatattgcctctgatcatagtcagaccaacattgctacgacccgtattcgcaccgacac

SEQ ID NO: 1155 - DNA, 127 bp, synthetic construct
  source 1..127: mol_type = other DNA
acatttgtttctacaaccataaaatgataattacacccataaattgataattatcacacccataaattgatattgcctctgatcatagtcagaccaacattgctacgacccgtattcgcaccgacac

SEQ ID NO: 1156 - DNA, 127 bp, synthetic construct
  source 1..127: mol_type = other DNA
acatttgtgtatacaaccataaaatgataattacacccataaattgataattatcacacccataaattgatattgcctctgatcatagtcagaccaacattgctacgacccgtattcgcaccgacac

SEQ ID NO: 1157 - DNA, 127 bp, synthetic construct
  source 1..127: mol_type = other DNA
acatttggggatacaaccataaaatgataattacacccataaattgataattatcacacccataaattgatattgcctctgatcatagtcagaccaacattgctacgacccgtattcgcaccgacac

SEQ ID NO: 1158 - DNA, 127 bp, synthetic construct
  source 1..127: mol_type = other DNA
acattttgtgatacaaccataaaatgataattacacccataaattgataattatcacacccataaattgatattgcctctgatcatagtcagaccaacattgctacgacccgtattcgcaccgacac

SEQ ID NO: 1159 - DNA, 127 bp, synthetic construct
  source 1..127: mol_type = other DNA
acattgtttgatacaaccataaaatgataattacacccataaattgataattatcacacccataaattgatattgcctctgatcatagtcagaccaacattgctacgacccgtattcgcaccgacac

SEQ ID NO: 1160 - DNA, 127 bp, synthetic construct
  source 1..127: mol_type = other DNA
acatgggttgatacaaccataaaatgataattacacccataaattgataattatcacacccataaattgatattgcctctgatcatagtcagaccaacattgctacgacccgtattcgcaccgacac

SEQ ID NO: 1161 - DNA, 127 bp, synthetic construct
  source 1..127: mol_type = other DNA
acaggtgttgatacaaccataaaatgataattacacccataaattgataattatcacacccataaattgatattgcctctgatcatagtcagaccaacattgctacgacccgtattcgcaccgacac

SEQ ID NO: 1162 - DNA, 127 bp, synthetic construct
  source 1..127: mol_type = other DNA
accgttgttgatacaaccataaaatgataattacacccataaattgataattatcacacccataaattgatattgcctctgatcatagtcagaccaacattgctacgacccgtattcgcaccgacac

SEQ ID NO: 1163 - DNA, 127 bp, synthetic construct
  source 1..127: mol_type = other DNA
aactttgttgatacaaccataaaatgataattacacccataaattgataattatcacacccataaattgatattgcctctgatcatagtcagaccaacattgctacgacccgtattcgcaccgacac

SEQ ID NO: 1164 - DNA, 127 bp, synthetic construct
  source 1..127: mol_type = other DNA
caatttgttgatacaaccataaaatgataattacacccataaattgataattatcacacccataaattgatattgcctctgatcatagtcagaccaacattgctacgacccgtattcgcaccgacac

SEQ ID NO: 1165 - DNA, 127 bp, synthetic construct
  source 1..127: mol_type = other DNA
cacggtgttgatacaaccataaaatgataattacacccataaattgataattatcacacccataaattgatattgcctctgatcatagtcagaccaacattgctacgacccgtattcgcaccgacac

SEQ ID NO: 1166 - DNA, 127 bp, synthetic construct
  source 1..127: mol_type = other DNA
acatttgttgatacaaccataaaatgataattacacccataaattgataattatcacacccataaattgatattgcctgagatcatagtcagaccaacattgctacgacccgtattcgcaccgacac

SEQ ID NO: 1167 - DNA, 127 bp, synthetic construct
  source 1..127: mol_type = other DNA
acatttgttgatacaaccataaaatgataattacacccataaattgataattatcacacccataaattgatattgccagtgatcatagtcagaccaacattgctacgacccgtattcgcaccgacac

SEQ ID NO: 1168 - DNA, 127 bp, synthetic construct
  source 1..127: mol_type = other DNA
acatttgttgatacaaccataaaatgataattacacccataaattgataattatcacacccataaattgatattgcgactgatcatagtcagaccaacattgctacgacccgtattcgcaccgacac

SEQ ID NO: 1169 - DNA, 127 bp, synthetic construct
  source 1..127: mol_type = other DNA
acatttgttgatacaaccataaaatgataattacacccataaattgataattatcacacccataaattgatattgggtctgatcatagtcagaccaacattgctacgacccgtattcgcaccgacac

SEQ ID NO: 1170 - DNA, 127 bp, synthetic construct
  source 1..127: mol_type = other DNA
acatttgttgatacaaccataaaatgataattacacccataaattgataattatcacacccataaattgatattcgctctgatcatagtcagaccaacattgctacgacccgtattcgcaccgacac

SEQ ID NO: 1171 - DNA, 127 bp, synthetic construct
  source 1..127: mol_type = other DNA
acatttgttgatacaaccataaaatgataattacacccataaattgataattatcacacccataaattgatataccctctgatcatagtcagaccaacattgctacgacccgtattcgcaccgacac

SEQ ID NO: 1172 - DNA, 127 bp, synthetic construct
  source 1..127: mol_type = other DNA
acatttgttgatacaaccataaaatgataattacacccataaattgataattatcacacccataaattgataaagcctctgatcatagtcagaccaacattgctacgacccgtattcgcaccgacac

SEQ ID NO: 1173 - DNA, 127 bp, synthetic construct
  source 1..127: mol_type = other DNA
acatttgttgatacaaccataaaatgataattacacccataaattgataattatcacacccataaattgattatgcctctgatcatagtcagaccaacattgctacgacccgtattcgcaccgacac

SEQ ID NO: 1174 - DNA, 127 bp, synthetic construct
  source 1..127: mol_type = other DNA
acatttgttgatacaaccataaaatgataattacacccataaattgataattatcacacccataaattgaatttgcctctgatcatagtcagaccaacattgctacgacccgtattcgcaccgacac

SEQ ID NO: 1175 - DNA, 127 bp, synthetic construct
  source 1..127: mol_type = other DNA
acatttgttgatacaaccataaaatgataattacacccataaattgataattatcacacccataaattgtaattgcctctgatcatagtcagaccaacattgctacgacccgtattcgcaccgacac

SEQ ID NO: 1176 - DNA, 127 bp, synthetic construct
  source 1..127: mol_type = other DNA
acatttgttgatacaaccataaaatgataattacacccataaattgataattatcacacccataaattcttattgcctctgatcatagtcagaccaacattgctacgacccgtattcgcaccgacac

SEQ ID NO: 1177 - DNA, 127 bp, synthetic construct
  source 1..127: mol_type = other DNA
acatttgttgatacaaccataaaatgataattacacccataaattgataattatcacacccataaatacatattgcctctgatcatagtcagaccaacattgctacgacccgtattcgcaccgacac

SEQ ID NO: 1178 - DNA, 127 bp, synthetic construct
  source 1..127: mol_type = other DNA
acatttgttgatacaaccataaaatgataattacacccataaattgataattatcacacccataaaaagatattgcctctgatcatagtcagaccaacattgctacgacccgtattcgcaccgacac

SEQ ID NO: 1179 - DNA, 127 bp, synthetic construct
  source 1..127: mol_type = other DNA
acatttgttgatacaaccataaaatgataattacacccataaattgataattatcacacccataatatgatattgcctctgatcatagtcagaccaacattgctacgacccgtattcgcaccgacac

SEQ ID NO: 1180 - DNA, 127 bp, synthetic construct
  source 1..127: mol_type = other DNA
acatttgttgatacaaccataaaatgataattacacccataaattgataattatcacacccatattttgatattgcctctgatcatagtcagaccaacattgctacgacccgtattcgcaccgacac

SEQ ID NO: 1181 - DNA, 127 bp, synthetic construct
  source 1..127: mol_type = other DNA
acatttgttgatacaaccataaaatgataattacacccataaattgataattatcacacccatttattgatattgcctctgatcatagtcagaccaacattgctacgacccgtattcgcaccgacac

SEQ ID NO: 1182 - DNA, 127 bp, synthetic construct
  source 1..127: mol_type = other DNA
acatttgttgatacaaccataaaatgataattacacccataaattgataattatcacacccaataattgatattgcctctgatcatagtcagaccaacattgctacgacccgtattcgcaccgacac

SEQ ID NO: 1183 - DNA, 127 bp, synthetic construct
  source 1..127: mol_type = other DNA
acatttgttgatacaaccataaaatgataattacacccataaattgataattatcacaccctaaaattgatattgcctctgatcatagtcagaccaacattgctacgacccgtattcgcaccgacac

SEQ ID NO: 1184 - DNA, 127 bp, synthetic construct
  source 1..127: mol_type = other DNA
acatttgttgatacaaccataaaatgataattacacccataaattgataattatcacaccgttaaattgatattgcctctgatcatagtcagaccaacattgctacgacccgtattcgcaccgacac

SEQ ID NO: 1185 - DNA, 127 bp, synthetic construct
  source 1..127: mol_type = other DNA
acatttgttgatacaaccataaaatgataattacacccataaattgataattatcacacggataaattgatattgcctctgatcatagtcagaccaacattgctacgacccgtattcgcaccgacac

SEQ ID NO: 1186 - DNA, 127 bp, synthetic construct
  source 1..127: mol_type = other DNA
acatttgttgatacaaccataaaatgataattacacccataaattgataattatcacaggcataaattgatattgcctctgatcatagtcagaccaacattgctacgacccgtattcgcaccgacac

SEQ ID NO: 1187 - DNA, 127 bp, synthetic construct
  source 1..127: mol_type = other DNA
acatttgttgatacaaccataaaatgataattacacccataaattgataattatcactgccataaattgatattgcctctgatcatagtcagaccaacattgctacgacccgtattcgcaccgacac

SEQ ID NO: 1188 - DNA, 127 bp, synthetic construct
  source 1..127: mol_type = other DNA
acatttgttgatacaaccataaaatgataattacacccataaattgataattatcagtcccataaattgatattgcctctgatcatagtcagaccaacattgctacgacccgtattcgcaccgacac

SEQ ID NO: 1189 - DNA, 127 bp, synthetic construct
  source 1..127: mol_type = other DNA
acatttgttgatacaaccataaaatgataattacacccataaattgataattatctgacccataaattgatattgcctctgatcatagtcagaccaacattgctacgacccgtattcgcaccgacac

SEQ ID NO: 1190 - DNA, 127 bp, synthetic construct
  source 1..127: mol_type = other DNA
acatttgttgatacaaccataaaatgataattacacccataaattgataattatgtcacccataaattgatattgcctctgatcatagtcagaccaacattgctacgacccgtattcgcaccgacac

SEQ ID NO: 1191 - DNA, 127 bp, synthetic construct
  source 1..127: mol_type = other DNA
acatttgttgatacaaccataaaatgataattacacccataaattgataattaagacacccataaattgatattgcctctgatcatagtcagaccaacattgctacgacccgtattcgcaccgacac

SEQ ID NO: 1192 - DNA, 127 bp, synthetic construct
  source 1..127: mol_type = other DNA
acatttgttgatacaaccataaaatgataattacacccataaattgataatttacacacccataaattgatattgcctctgatcatagtcagaccaacattgctacgacccgtattcgcaccgacac

SEQ ID NO: 1193 - DNA, 127 bp, synthetic construct
  source 1..127: mol_type = other DNA
acatttgttgatacaaccataaaatgataattacacccataaattgataatattcacacccataaattgatattgcctctgatcatagtcagaccaacattgctacgacccgtattcgcaccgacac

SEQ ID NO: 1194 - DNA, 127 bp, synthetic construct
  source 1..127: mol_type = other DNA
acatttgttgatacaaccataaaatgataattacacccataaattgataaaaatcacacccataaattgatattgcctctgatcatagtcagaccaacattgctacgacccgtattcgcaccgacac

SEQ ID NO: 1195 - DNA, 127 bp, synthetic construct
  source 1..127: mol_type = other DNA
acatttgttgatacaaccataaaatgataattacacccataaattgatatatatcacacccataaattgatattgcctctgatcatagtcagaccaacattgctacgacccgtattcgcaccgacac

SEQ ID NO: 1196 - DNA, 127 bp, synthetic construct
  source 1..127: mol_type = other DNA
acatttgttgatacaaccataaaatgataattacacccataaattgatttttatcacacccataaattgatattgcctctgatcatagtcagaccaacattgctacgacccgtattcgcaccgacac

SEQ ID NO: 1197 - DNA, 127 bp, synthetic construct
  source 1..127: mol_type = other DNA
acatttgttgatacaaccataaaatgataattacacccataaattgaatattatcacacccataaattgatattgcctctgatcatagtcagaccaacattgctacgacccgtattcgcaccgacac

SEQ ID NO: 1198 - DNA, 127 bp, synthetic construct
  source 1..127: mol_type = other DNA
acatttgttgatacaaccataaaatgataattacacccataaattgtaaattatcacacccataaattgatattgcctctgatcatagtcagaccaacattgctacgacccgtattcgcaccgacac

SEQ ID NO: 1199 - DNA, 127 bp, synthetic construct
  source 1..127: mol_type = other DNA
acatttgttgatacaaccataaaatgataattacacccataaattcttaattatcacacccataaattgatattgcctctgatcatagtcagaccaacattgctacgacccgtattcgcaccgacac

SEQ ID NO: 1200 - DNA, 127 bp, synthetic construct
  source 1..127: mol_type = other DNA
acatttgttgatacaaccataaaatgataattacacccataaatacataattatcacacccataaattgatattgcctctgatcatagtcagaccaacattgctacgacccgtattcgcaccgacac

SEQ ID NO: 1201 - DNA, 127 bp, synthetic construct
  source 1..127: mol_type = other DNA
acatttgttgatacaaccataaaatgataattacacccataaaaagataattatcacacccataaattgatattgcctctgatcatagtcagaccaacattgctacgacccgtattcgcaccgacac

SEQ ID NO: 1202 - DNA, 127 bp, synthetic construct
  source 1..127: mol_type = other DNA
acatttgttgatacaaccataaaatgataattacacccataatatgataattatcacacccataaattgatattgcctctgatcatagtcagaccaacattgctacgacccgtattcgcaccgacac

SEQ ID NO: 1203 - DNA, 127 bp, synthetic construct
  source 1..127: mol_type = other DNA
acatttgttgatacaaccataaaatgataattacacccatattttgataattatcacacccataaattgatattgcctctgatcatagtcagaccaacattgctacgacccgtattcgcaccgacac

SEQ ID NO: 1204 - DNA, 127 bp, synthetic construct
  source 1..127: mol_type = other DNA
acatttgttgatacaaccataaaatgataattacacccatttattgataattatcacacccataaattgatattgcctctgatcatagtcagaccaacattgctacgacccgtattcgcaccgacac

SEQ ID NO: 1205 - DNA, 127 bp, synthetic construct
  source 1..127: mol_type = other DNA
acatttgttgatacaaccataaaatgataattacacccaataattgataattatcacacccataaattgatattgcctctgatcatagtcagaccaacattgctacgacccgtattcgcaccgacac

SEQ ID NO: 1206 - DNA, 127 bp, synthetic construct
  source 1..127: mol_type = other DNA
acatttgttgatacaaccataaaatgataattacaccctaaaattgataattatcacacccataaattgatattgcctctgatcatagtcagaccaacattgctacgacccgtattcgcaccgacac

SEQ ID NO: 1207 - DNA, 127 bp, synthetic construct
  source 1..127: mol_type = other DNA
acatttgttgatacaaccataaaatgataattacaccgttaaattgataattatcacacccataaattgatattgcctctgatcatagtcagaccaacattgctacgacccgtattcgcaccgacac

SEQ ID NO: 1208 - DNA, 127 bp, synthetic construct
  source 1..127: mol_type = other DNA
acatttgttgatacaaccataaaatgataattacacggataaattgataattatcacacccataaattgatattgcctctgatcatagtcagaccaacattgctacgacccgtattcgcaccgacac

SEQ ID NO: 1209 - DNA, 127 bp, synthetic construct
  source 1..127: mol_type = other DNA
acatttgttgatacaaccataaaatgataattacaggcataaattgataattatcacacccataaattgatattgcctctgatcatagtcagaccaacattgctacgacccgtattcgcaccgacac

SEQ ID NO: 1210 - DNA, 127 bp, synthetic construct
  source 1..127: mol_type = other DNA
acatttgttgatacaaccataaaatgataattactgccataaattgataattatcacacccataaattgatattgcctctgatcatagtcagaccaacattgctacgacccgtattcgcaccgacac

SEQ ID NO: 1211 - DNA, 127 bp, synthetic construct
  source 1..127: mol_type = other DNA
acatttgttgatacaaccataaaatgataattagtcccataaattgataattatcacacccataaattgatattgcctctgatcatagtcagaccaacattgctacgacccgtattcgcaccgacac

SEQ ID NO: 1212 - DNA, 127 bp, synthetic construct
  source 1..127: mol_type = other DNA
acatttgttgatacaaccataaaatgataatttgacccataaattgataattatcacacccataaattgatattgcctctgatcatagtcagaccaacattgctacgacccgtattcgcaccgacac

SEQ ID NO: 1213 - DNA, 127 bp, synthetic construct
  source 1..127: mol_type = other DNA
acatttgttgatacaaccataaaatgataatatcacccataaattgataattatcacacccataaattgatattgcctctgatcatagtcagaccaacattgctacgacccgtattcgcaccgacac

SEQ ID NO: 1214 - DNA, 127 bp, synthetic construct
  source 1..127: mol_type = other DNA
acatttgttgatacaaccataaaatgataaaaacacccataaattgataattatcacacccataaattgatattgcctctgatcatagtcagaccaacattgctacgacccgtattcgcaccgacac

SEQ ID NO: 1215 - DNA, 127 bp, synthetic construct
  source 1..127: mol_type = other DNA
acatttgttgatacaaccataaaatgatatatacacccataaattgataattatcacacccataaattgatattgcctctgatcatagtcagaccaacattgctacgacccgtattcgcaccgacac

SEQ ID NO: 1216 - DNA, 127 bp, synthetic construct
  source 1..127: mol_type = other DNA
acatttgttgatacaaccataaaatgatttttacacccataaattgataattatcacacccataaattgatattgcctctgatcatagtcagaccaacattgctacgacccgtattcgcaccgacac

SEQ ID NO: 1217 - DNA, 127 bp, synthetic construct
  source 1..127: mol_type = other DNA
acatttgttgatacaaccataaaatgaatattacacccataaattgataattatcacacccataaattgatattgcctctgatcatagtcagaccaacattgctacgacccgtattcgcaccgacac

SEQ ID NO: 1218 - DNA, 127 bp, synthetic construct
  source 1..127: mol_type = other DNA
acatttgttgatacaaccataaaatgtaaattacacccataaattgataattatcacacccataaattgatattgcctctgatcatagtcagaccaacattgctacgacccgtattcgcaccgacac

SEQ ID NO: 1219 - DNA, 127 bp, synthetic construct
  source 1..127: mol_type = other DNA
acatttgttgatacaaccataaaatcttaattacacccataaattgataattatcacacccataaattgatattgcctctgatcatagtcagaccaacattgctacgacccgtattcgcaccgacac

SEQ ID NO: 1220 - DNA, 127 bp, synthetic construct
  source 1..127: mol_type = other DNA
acatttgttgatacaaccataaaaacataattacacccataaattgataattatcacacccataaattgatattgcctctgatcatagtcagaccaacattgctacgacccgtattcgcaccgacac

SEQ ID NO: 1221 - DNA, 127 bp, synthetic construct
  source 1..127: mol_type = other DNA
acatttgttgatacaaccataaatagataattacacccataaattgataattatcacacccataaattgatattgcctctgatcatagtcagaccaacattgctacgacccgtattcgcaccgacac

SEQ ID NO: 1222 - DNA, 127 bp, synthetic construct
  source 1..127: mol_type = other DNA
acatttgttgatacaaccataatttgataattacacccataaattgataattatcacacccataaattgatattgcctctgatcatagtcagaccaacattgctacgacccgtattcgcaccgacac

SEQ ID NO: 1223 - DNA, 127 bp, synthetic construct
  source 1..127: mol_type = other DNA
acatttgttgatacaaccatattatgataattacacccataaattgataattatcacacccataaattgatattgcctctgatcatagtcagaccaacattgctacgacccgtattcgcaccgacac

SEQ ID NO: 1224 - DNA, 127 bp, synthetic construct
  source 1..127: mol_type = other DNA
acatttgttgatacaaccatttaatgataattacacccataaattgataattatcacacccataaattgatattgcctctgatcatagtcagaccaacattgctacgacccgtattcgcaccgacac

SEQ ID NO: 1225 - DNA, 127 bp, synthetic construct
  source 1..127: mol_type = other DNA
acatttgttgatacaaccaataaatgataattacacccataaattgataattatcacacccataaattgatattgcctctgatcatagtcagaccaacattgctacgacccgtattcgcaccgacac

SEQ ID NO: 1226 - DNA, 127 bp, synthetic construct
  source 1..127: mol_type = other DNA
acatttgttgatacaacctaaaaatgataattacacccataaattgataattatcacacccataaattgatattgcctctgatcatagtcagaccaacattgctacgacccgtattcgcaccgacac

SEQ ID NO: 1227 - DNA, 127 bp, synthetic construct
  source 1..127: mol_type = other DNA
acatttgttgatacaacgttaaaatgataattacacccataaattgataattatcacacccataaattgatattgcctctgatcatagtcagaccaacattgctacgacccgtattcgcaccgacac

SEQ ID NO: 1228 - DNA, 127 bp, synthetic construct
  source 1..127: mol_type = other DNA
acatttgttgatacaaggataaaatgataattacacccataaattgataattatcacacccataaattgatattgcctctgatcatagtcagaccaacattgctacgacccgtattcgcaccgacac

SEQ ID NO: 1229 - DNA, 127 bp, synthetic construct
  source 1..127: mol_type = other DNA
acatttgttgatacatgcataaaatgataattacacccataaattgataattatcacacccataaattgatattgcctctgatcatagtcagaccaacattgctacgacccgtattcgcaccgacac

SEQ ID NO: 1230 - DNA, 127 bp, synthetic construct
  source 1..127: mol_type = other DNA
acatttgttgatacttccataaaatgataattacacccataaattgataattatcacacccataaattgatattgcctctgatcatagtcagaccaacattgctacgacccgtattcgcaccgacac

SEQ ID NO: 1231 - DNA, 127 bp, synthetic construct
  source 1..127: mol_type = other DNA
acatttgttgatagtaccataaaatgataattacacccataaattgataattatcacacccataaattgatattgcctctgatcatagtcagaccaacattgctacgacccgtattcgcaccgacac

SEQ ID NO: 1232 - DNA, 127 bp, synthetic construct
  source 1..127: mol_type = other DNA
acatttgttgattgaaccataaaatgataattacacccataaattgataattatcacacccataaattgatattgcctctgatcatagtcagaccaacattgctacgacccgtattcgcaccgacac

SEQ ID NO: 1233 - DNA, 127 bp, synthetic construct
  source 1..127: mol_type = other DNA
acatttgttgaatcaaccataaaatgataattacacccataaattgataattatcacacccataaattgatattgcctctgatcatagtcagaccaacattgctacgacccgtattcgcaccgacac

SEQ ID NO: 1234 - DNA, 127 bp, synthetic construct
  source 1..127: mol_type = other DNA
acatttgttgtaacaaccataaaatgataattacacccataaattgataattatcacacccataaattgatattgcctctgatcatagtcagaccaacattgctacgacccgtattcgcaccgacac

SEQ ID NO: 1235 - DNA, 127 bp, synthetic construct
  source 1..127: mol_type = other DNA
acatttgttcttacaaccataaaatgataattacacccataaattgataattatcacacccataaattgatattgcctctgatcatagtcagaccaacattgctacgacccgtattcgcaccgacac

SEQ ID NO: 1236 - DNA, 127 bp, synthetic construct
  source 1..127: mol_type = other DNA
acatttgtacatacaaccataaaatgataattacacccataaattgataattatcacacccataaattgatattgcctctgatcatagtcagaccaacattgctacgacccgtattcgcaccgacac

SEQ ID NO: 1237 - DNA, 127 bp, synthetic construct
  source 1..127: mol_type = other DNA
acatttgaagatacaaccataaaatgataattacacccataaattgataattatcacacccataaattgatattgcctctgatcatagtcagaccaacattgctacgacccgtattcgcaccgacac

SEQ ID NO: 1238 - DNA, 127 bp, synthetic construct
  source 1..127: mol_type = other DNA
acatttcatgatacaaccataaaatgataattacacccataaattgataattatcacacccataaattgatattgcctctgatcatagtcagaccaacattgctacgacccgtattcgcaccgacac

SEQ ID NO: 1239 - DNA, 127 bp, synthetic construct
  source 1..127: mol_type = other DNA
acattacttgatacaaccataaaatgataattacacccataaattgataattatcacacccataaattgatattgcctctgatcatagtcagaccaacattgctacgacccgtattcgcaccgacac

SEQ ID NO: 1240 - DNA, 127 bp, synthetic construct
  source 1..127: mol_type = other DNA
acataagttgatacaaccataaaatgataattacacccataaattgataattatcacacccataaattgatattgcctctgatcatagtcagaccaacattgctacgacccgtattcgcaccgacac

SEQ ID NO: 1241 - DNA, 127 bp, synthetic construct
  source 1..127: mol_type = other DNA
acaaatgttgatacaaccataaaatgataattacacccataaattgataattatcacacccataaattgatattgcctctgatcatagtcagaccaacattgctacgacccgtattcgcaccgacac

SEQ ID NO: 1242 - DNA, 127 bp, synthetic construct
  source 1..127: mol_type = other DNA
actattgttgatacaaccataaaatgataattacacccataaattgataattatcacacccataaattgatattgcctctgatcatagtcagaccaacattgctacgacccgtattcgcaccgacac

SEQ ID NO: 1243 - DNA, 127 bp, synthetic construct
  source 1..127: mol_type = other DNA
agttttgttgatacaaccataaaatgataattacacccataaattgataattatcacacccataaattgatattgcctctgatcatagtcagaccaacattgctacgacccgtattcgcaccgacac

SEQ ID NO: 1244 - DNA, 127 bp, synthetic construct
  source 1..127: mol_type = other DNA
tgatttgttgatacaaccataaaatgataattacacccataaattgataattatcacacccataaattgatattgcctctgatcatagtcagaccaacattgctacgacccgtattcgcaccgacac

SEQ ID NO: 1245 - DNA, 127 bp, synthetic construct
  source 1..127: mol_type = other DNA
tgtaatgttgatacaaccataaaatgataattacacccataaattgataattatcacacccataaattgatattgcctctgatcatagtcagaccaacattgctacgacccgtattcgcaccgacac

SEQ ID NO: 1246 - DNA, 127 bp, synthetic construct
  source 1..127: mol_type = other DNA
cgcgctgttgatacaaccataaaatgataattacacccataaattgataattatcacacccataaattgatattgcctctgatcatagtcagaccaacattgctacgacccgtattcgcaccgacac

SEQ ID NO: 1247 - DNA, 127 bp, synthetic construct
  source 1..127: mol_type = other DNA
tataatgttgatacaaccataaaatgataattacacccataaattgataattatcacacccataaattgatattgcctctgatcatagtcagaccaacattgctacgacccgtattcgcaccgacac

SEQ ID NO: 1248 - DNA, 127 bp, synthetic construct
  source 1..127: mol_type = other DNA
tgtattgttgatacaaccataaaatgataattacacccataaattgataattatcacacccataaattgatattgcctctgatcatagtcagaccaacattgctacgacccgtattcgcaccgacac

SEQ ID NO: 1249 - DNA, 127 bp, synthetic construct
  source 1..127: mol_type = other DNA
agtaatgttgatacaaccataaaatgataattacacccataaattgataattatcacacccataaattgatattgcctctgatcatagtcagaccaacattgctacgacccgtattcgcaccgacac

SEQ ID NO: 1250 - DNA, 127 bp, synthetic construct
  source 1..127: mol_type = other DNA
actaaagttgatacaaccataaaatgataattacacccataaattgataattatcacacccataaattgatattgcctctgatcatagtcagaccaacattgctacgacccgtattcgcaccgacac

SEQ ID NO: 1251 - DNA, 127 bp, synthetic construct
  source 1..127: mol_type = other DNA
acaaaacttgatacaaccataaaatgataattacacccataaattgataattatcacacccataaattgatattgcctctgatcatagtcagaccaacattgctacgacccgtattcgcaccgacac

SEQ ID NO: 1252 - DNA, 127 bp, synthetic construct
  source 1..127: mol_type = other DNA
acataacatgatacaaccataaaatgataattacacccataaattgataattatcacacccataaattgatattgcctctgatcatagtcagaccaacattgctacgacccgtattcgcaccgacac

SEQ ID NO: 1253 - DNA, 127 bp, synthetic construct
  source 1..127: mol_type = other DNA
acattacaagatacaaccataaaatgataattacacccataaattgataattatcacacccataaattgatattgcctctgatcatagtcagaccaacattgctacgacccgtattcgcaccgacac

SEQ ID NO: 1254 - DNA, 127 bp, synthetic construct
  source 1..127: mol_type = other DNA
acatttcaacatacaaccataaaatgataattacacccataaattgataattatcacacccataaattgatattgcctctgatcatagtcagaccaacattgctacgacccgtattcgcaccgacac

SEQ ID NO: 1255 - DNA, 127 bp, synthetic construct
  source 1..127: mol_type = other DNA
acatttgaacttacaaccataaaatgataattacacccataaattgataattatcacacccataaattgatattgcctctgatcatagtcagaccaacattgctacgacccgtattcgcaccgacac

SEQ ID NO: 1256 - DNA, 127 bp, synthetic construct
  source 1..127: mol_type = other DNA
acatttgtactaacaaccataaaatgataattacacccataaattgataattatcacacccataaattgatattgcctctgatcatagtcagaccaacattgctacgacccgtattcgcaccgacac

SEQ ID NO: 1257 - DNA, 127 bp, synthetic construct
  source 1..127: mol_type = other DNA
acatttgttctatcaaccataaaatgataattacacccataaattgataattatcacacccataaattgatattgcctctgatcatagtcagaccaacattgctacgacccgtattcgcaccgacac

SEQ ID NO: 1258 - DNA, 127 bp, synthetic construct
  source 1..127: mol_type = other DNA
acatttgttgtatgaaccataaaatgataattacacccataaattgataattatcacacccataaattgatattgcctctgatcatagtcagaccaacattgctacgacccgtattcgcaccgacac

SEQ ID NO: 1259 - DNA, 127 bp, synthetic construct
  source 1..127: mol_type = other DNA
acatttgttgaatgtaccataaaatgataattacacccataaattgataattatcacacccataaattgatattgcctctgatcatagtcagaccaacattgctacgacccgtattcgcaccgacac

SEQ ID NO: 1260 - DNA, 127 bp, synthetic construct
  source 1..127: mol_type = other DNA
acatttgttgattgttccataaaatgataattacacccataaattgataattatcacacccataaattgatattgcctctgatcatagtcagaccaacattgctacgacccgtattcgcaccgacac

SEQ ID NO: 1261 - DNA, 127 bp, synthetic construct
  source 1..127: mol_type = other DNA
acatttgttgatagttgcataaaatgataattacacccataaattgataattatcacacccataaattgatattgcctctgatcatagtcagaccaacattgctacgacccgtattcgcaccgacac

SEQ ID NO: 1262 - DNA, 127 bp, synthetic construct
  source 1..127: mol_type = other DNA
acatttgttgatacttggataaaatgataattacacccataaattgataattatcacacccataaattgatattgcctctgatcatagtcagaccaacattgctacgacccgtattcgcaccgacac

SEQ ID NO: 1263 - DNA, 127 bp, synthetic construct
  source 1..127: mol_type = other DNA
acatttgttgatacatggttaaaatgataattacacccataaattgataattatcacacccataaattgatattgcctctgatcatagtcagaccaacattgctacgacccgtattcgcaccgacac

SEQ ID NO: 1264 - DNA, 127 bp, synthetic construct
  source 1..127: mol_type = other DNA
acatttgttgatacaaggtaaaaatgataattacacccataaattgataattatcacacccataaattgatattgcctctgatcatagtcagaccaacattgctacgacccgtattcgcaccgacac

SEQ ID NO: 1265 - DNA, 127 bp, synthetic construct
  source 1..127: mol_type = other DNA
acatttgttgatacaacgtataaatgataattacacccataaattgataattatcacacccataaattgatattgcctctgatcatagtcagaccaacattgctacgacccgtattcgcaccgacac

SEQ ID NO: 1266 - DNA, 127 bp, synthetic construct
  source 1..127: mol_type = other DNA
acatttgttgatacaacctattaatgataattacacccataaattgataattatcacacccataaattgatattgcctctgatcatagtcagaccaacattgctacgacccgtattcgcaccgacac

SEQ ID NO: 1267 - DNA, 127 bp, synthetic construct
  source 1..127: mol_type = other DNA
acatttgttgatacaaccaatttatgataattacacccataaattgataattatcacacccataaattgatattgcctctgatcatagtcagaccaacattgctacgacccgtattcgcaccgacac

SEQ ID NO: 1268 - DNA, 127 bp, synthetic construct
  source 1..127: mol_type = other DNA
acatttgttgatacaaccattttttgataattacacccataaattgataattatcacacccataaattgatattgcctctgatcatagtcagaccaacattgctacgacccgtattcgcaccgacac

SEQ ID NO: 1269 - DNA, 127 bp, synthetic construct
  source 1..127: mol_type = other DNA
acatttgttgatacaaccatatttagataattacacccataaattgataattatcacacccataaattgatattgcctctgatcatagtcagaccaacattgctacgacccgtattcgcaccgacac

SEQ ID NO: 1270 - DNA, 127 bp, synthetic construct
  source 1..127: mol_type = other DNA
acatttgttgatacaaccataattacataattacacccataaattgataattatcacacccataaattgatattgcctctgatcatagtcagaccaacattgctacgacccgtattcgcaccgacac

SEQ ID NO: 1271 - DNA, 127 bp, synthetic construct
  source 1..127: mol_type = other DNA
acatttgttgatacaaccataaatacttaattacacccataaattgataattatcacacccataaattgatattgcctctgatcatagtcagaccaacattgctacgacccgtattcgcaccgacac

SEQ ID NO: 1272 - DNA, 127 bp, synthetic construct
  source 1..127: mol_type = other DNA
acatttgttgatacaaccataaaaactaaattacacccataaattgataattatcacacccataaattgatattgcctctgatcatagtcagaccaacattgctacgacccgtattcgcaccgacac

SEQ ID NO: 1273 - DNA, 127 bp, synthetic construct
  source 1..127: mol_type = other DNA
acatttgttgatacaaccataaaatctatattacacccataaattgataattatcacacccataaattgatattgcctctgatcatagtcagaccaacattgctacgacccgtattcgcaccgacac

SEQ ID NO: 1274 - DNA, 127 bp, synthetic construct
  source 1..127: mol_type = other DNA
acatttgttgatacaaccataaaatgtattttacacccataaattgataattatcacacccataaattgatattgcctctgatcatagtcagaccaacattgctacgacccgtattcgcaccgacac

SEQ ID NO: 1275 - DNA, 127 bp, synthetic construct
  source 1..127: mol_type = other DNA
acatttgttgatacaaccataaaatgaattatacacccataaattgataattatcacacccataaattgatattgcctctgatcatagtcagaccaacattgctacgacccgtattcgcaccgacac

SEQ ID NO: 1276 - DNA, 127 bp, synthetic construct
  source 1..127: mol_type = other DNA
acatttgttgatacaaccataaaatgatttaaacacccataaattgataattatcacacccataaattgatattgcctctgatcatagtcagaccaacattgctacgacccgtattcgcaccgacac

SEQ ID NO: 1277 - DNA, 127 bp, synthetic construct
  source 1..127: mol_type = other DNA
acatttgttgatacaaccataaaatgatataatcacccataaattgataattatcacacccataaattgatattgcctctgatcatagtcagaccaacattgctacgacccgtattcgcaccgacac

SEQ ID NO: 1278 - DNA, 127 bp, synthetic construct
  source 1..127: mol_type = other DNA
acatttgttgatacaaccataaaatgataaaatgacccataaattgataattatcacacccataaattgatattgcctctgatcatagtcagaccaacattgctacgacccgtattcgcaccgacac

SEQ ID NO: 1279 - DNA, 127 bp, synthetic construct
  source 1..127: mol_type = other DNA
acatttgttgatacaaccataaaatgataatatgtcccataaattgataattatcacacccataaattgatattgcctctgatcatagtcagaccaacattgctacgacccgtattcgcaccgacac

SEQ ID NO: 1280 - DNA, 127 bp, synthetic construct
  source 1..127: mol_type = other DNA
acatttgttgatacaaccataaaatgataatttgtgccataaattgataattatcacacccataaattgatattgcctctgatcatagtcagaccaacattgctacgacccgtattcgcaccgacac

SEQ ID NO: 1281 - DNA, 127 bp, synthetic construct
  source 1..127: mol_type = other DNA
acatttgttgatacaaccataaaatgataattagtggcataaattgataattatcacacccataaattgatattgcctctgatcatagtcagaccaacattgctacgacccgtattcgcaccgacac

SEQ ID NO: 1282 - DNA, 127 bp, synthetic construct
  source 1..127: mol_type = other DNA
acatttgttgatacaaccataaaatgataattactgggataaattgataattatcacacccataaattgatattgcctctgatcatagtcagaccaacattgctacgacccgtattcgcaccgacac

SEQ ID NO: 1283 - DNA, 127 bp, synthetic construct
  source 1..127: mol_type = other DNA
acatttgttgatacaaccataaaatgataattacagggttaaattgataattatcacacccataaattgatattgcctctgatcatagtcagaccaacattgctacgacccgtattcgcaccgacac

SEQ ID NO: 1284 - DNA, 127 bp, synthetic construct
  source 1..127: mol_type = other DNA
acatttgttgatacaaccataaaatgataattacacggtaaaattgataattatcacacccataaattgatattgcctctgatcatagtcagaccaacattgctacgacccgtattcgcaccgacac

SEQ ID NO: 1285 - DNA, 127 bp, synthetic construct
  source 1..127: mol_type = other DNA
acatttgttgatacaaccataaaatgataattacaccgtataattgataattatcacacccataaattgatattgcctctgatcatagtcagaccaacattgctacgacccgtattcgcaccgacac

SEQ ID NO: 1286 - DNA, 127 bp, synthetic construct
  source 1..127: mol_type = other DNA
acatttgttgatacaaccataaaatgataattacaccctattattgataattatcacacccataaattgatattgcctctgatcatagtcagaccaacattgctacgacccgtattcgcaccgacac

SEQ ID NO: 1287 - DNA, 127 bp, synthetic construct
  source 1..127: mol_type = other DNA
acatttgttgatacaaccataaaatgataattacacccaatttttgataattatcacacccataaattgatattgcctctgatcatagtcagaccaacattgctacgacccgtattcgcaccgacac

SEQ ID NO: 1288 - DNA, 127 bp, synthetic construct
  source 1..127: mol_type = other DNA
acatttgttgatacaaccataaaatgataattacacccattttatgataattatcacacccataaattgatattgcctctgatcatagtcagaccaacattgctacgacccgtattcgcaccgacac

SEQ ID NO: 1289 - DNA, 127 bp, synthetic construct
  source 1..127: mol_type = other DNA
acatttgttgatacaaccataaaatgataattacacccatattaagataattatcacacccataaattgatattgcctctgatcatagtcagaccaacattgctacgacccgtattcgcaccgacac

SEQ ID NO: 1290 - DNA, 127 bp, synthetic construct
  source 1..127: mol_type = other DNA
acatttgttgatacaaccataaaatgataattacacccataataacataattatcacacccataaattgatattgcctctgatcatagtcagaccaacattgctacgacccgtattcgcaccgacac

SEQ ID NO: 1291 - DNA, 127 bp, synthetic construct
  source 1..127: mol_type = other DNA
acatttgttgatacaaccataaaatgataattacacccataaaaacttaattatcacacccataaattgatattgcctctgatcatagtcagaccaacattgctacgacccgtattcgcaccgacac

SEQ ID NO: 1292 - DNA, 127 bp, synthetic construct
  source 1..127: mol_type = other DNA
acatttgttgatacaaccataaaatgataattacacccataaatactaaattatcacacccataaattgatattgcctctgatcatagtcagaccaacattgctacgacccgtattcgcaccgacac

SEQ ID NO: 1293 - DNA, 127 bp, synthetic construct
  source 1..127: mol_type = other DNA
acatttgttgatacaaccataaaatgataattacacccataaattctatattatcacacccataaattgatattgcctctgatcatagtcagaccaacattgctacgacccgtattcgcaccgacac

SEQ ID NO: 1294 - DNA, 127 bp, synthetic construct
  source 1..127: mol_type = other DNA
acatttgttgatacaaccataaaatgataattacacccataaattgtattttatcacacccataaattgatattgcctctgatcatagtcagaccaacattgctacgacccgtattcgcaccgacac

SEQ ID NO: 1295 - DNA, 127 bp, synthetic construct
  source 1..127: mol_type = other DNA
acatttgttgatacaaccataaaatgataattacacccataaattgaattatatcacacccataaattgatattgcctctgatcatagtcagaccaacattgctacgacccgtattcgcaccgacac

SEQ ID NO: 1296 - DNA, 127 bp, synthetic construct
  source 1..127: mol_type = other DNA
acatttgttgatacaaccataaaatgataattacacccataaattgatttaaatcacacccataaattgatattgcctctgatcatagtcagaccaacattgctacgacccgtattcgcaccgacac

SEQ ID NO: 1297 - DNA, 127 bp, synthetic construct
  source 1..127: mol_type = other DNA
acatttgttgatacaaccataaaatgataattacacccataaattgatataattcacacccataaattgatattgcctctgatcatagtcagaccaacattgctacgacccgtattcgcaccgacac

SEQ ID NO: 1298 - DNA, 127 bp, synthetic construct
  source 1..127: mol_type = other DNA
acatttgttgatacaaccataaaatgataattacacccataaattgataaaatacacacccataaattgatattgcctctgatcatagtcagaccaacattgctacgacccgtattcgcaccgacac

SEQ ID NO: 1299 - DNA, 127 bp, synthetic construct
  source 1..127: mol_type = other DNA
acatttgttgatacaaccataaaatgataattacacccataaattgataatatagacacccataaattgatattgcctctgatcatagtcagaccaacattgctacgacccgtattcgcaccgacac

SEQ ID NO: 1300 - DNA, 127 bp, synthetic construct
  source 1..127: mol_type = other DNA
acatttgttgatacaaccataaaatgataattacacccataaattgataatttagtcacccataaattgatattgcctctgatcatagtcagaccaacattgctacgacccgtattcgcaccgacac

SEQ ID NO: 1301 - DNA, 127 bp, synthetic construct
  source 1..127: mol_type = other DNA
acatttgttgatacaaccataaaatgataattacacccataaattgataattaagtgacccataaattgatattgcctctgatcatagtcagaccaacattgctacgacccgtattcgcaccgacac

SEQ ID NO: 1302 - DNA, 127 bp, synthetic construct
  source 1..127: mol_type = other DNA
acatttgttgatacaaccataaaatgataattacacccataaattgataattatgtgtcccataaattgatattgcctctgatcatagtcagaccaacattgctacgacccgtattcgcaccgacac

SEQ ID NO: 1303 - DNA, 127 bp, synthetic construct
  source 1..127: mol_type = other DNA
acatttgttgatacaaccataaaatgataattacacccataaattgataattatctgtgccataaattgatattgcctctgatcatagtcagaccaacattgctacgacccgtattcgcaccgacac

SEQ ID NO: 1304 - DNA, 127 bp, synthetic construct
  source 1..127: mol_type = other DNA
acatttgttgatacaaccataaaatgataattacacccataaattgataattatcagtggcataaattgatattgcctctgatcatagtcagaccaacattgctacgacccgtattcgcaccgacac

SEQ ID NO: 1305 - DNA, 127 bp, synthetic construct
  source 1..127: mol_type = other DNA
acatttgttgatacaaccataaaatgataattacacccataaattgataattatcactgggataaattgatattgcctctgatcatagtcagaccaacattgctacgacccgtattcgcaccgacac

SEQ ID NO: 1306 - DNA, 127 bp, synthetic construct
  source 1..127: mol_type = other DNA
acatttgttgatacaaccataaaatgataattacacccataaattgataattatcacagggttaaattgatattgcctctgatcatagtcagaccaacattgctacgacccgtattcgcaccgacac

SEQ ID NO: 1307 - DNA, 127 bp, synthetic construct
  source 1..127: mol_type = other DNA
acatttgttgatacaaccataaaatgataattacacccataaattgataattatcacacggtaaaattgatattgcctctgatcatagtcagaccaacattgctacgacccgtattcgcaccgacac

SEQ ID NO: 1308 - DNA, 127 bp, synthetic construct
  source 1..127: mol_type = other DNA
acatttgttgatacaaccataaaatgataattacacccataaattgataattatcacaccgtataattgatattgcctctgatcatagtcagaccaacattgctacgacccgtattcgcaccgacac

SEQ ID NO: 1309 - DNA, 127 bp, synthetic construct
  source 1..127: mol_type = other DNA
acatttgttgatacaaccataaaatgataattacacccataaattgataattatcacaccctattattgatattgcctctgatcatagtcagaccaacattgctacgacccgtattcgcaccgacac

SEQ ID NO: 1310 - DNA, 127 bp, synthetic construct
  source 1..127: mol_type = other DNA
acatttgttgatacaaccataaaatgataattacacccataaattgataattatcacacccaatttttgatattgcctctgatcatagtcagaccaacattgctacgacccgtattcgcaccgacac

SEQ ID NO: 1311 - DNA, 127 bp, synthetic construct
  source 1..127: mol_type = other DNA
acatttgttgatacaaccataaaatgataattacacccataaattgataattatcacacccattttatgatattgcctctgatcatagtcagaccaacattgctacgacccgtattcgcaccgacac

SEQ ID NO: 1312 - DNA, 127 bp, synthetic construct
  source 1..127: mol_type = other DNA
acatttgttgatacaaccataaaatgataattacacccataaattgataattatcacacccatattaagatattgcctctgatcatagtcagaccaacattgctacgacccgtattcgcaccgacac

SEQ ID NO: 1313 - DNA, 127 bp, synthetic construct
  source 1..127: mol_type = other DNA
acatttgttgatacaaccataaaatgataattacacccataaattgataattatcacacccataataacatattgcctctgatcatagtcagaccaacattgctacgacccgtattcgcaccgacac

SEQ ID NO: 1314 - DNA, 127 bp, synthetic construct
  source 1..127: mol_type = other DNA
acatttgttgatacaaccataaaatgataattacacccataaattgataattatcacacccataaaaacttattgcctctgatcatagtcagaccaacattgctacgacccgtattcgcaccgacac

SEQ ID NO: 1315 - DNA, 127 bp, synthetic construct
  source 1..127: mol_type = other DNA
acatttgttgatacaaccataaaatgataattacacccataaattgataattatcacacccataaatactaattgcctctgatcatagtcagaccaacattgctacgacccgtattcgcaccgacac

SEQ ID NO: 1316 - DNA, 127 bp, synthetic construct
  source 1..127: mol_type = other DNA
acatttgttgatacaaccataaaatgataattacacccataaattgataattatcacacccataaattctatttgcctctgatcatagtcagaccaacattgctacgacccgtattcgcaccgacac

SEQ ID NO: 1317 - DNA, 127 bp, synthetic construct
  source 1..127: mol_type = other DNA
acatttgttgatacaaccataaaatgataattacacccataaattgataattatcacacccataaattgtatatgcctctgatcatagtcagaccaacattgctacgacccgtattcgcaccgacac

SEQ ID NO: 1318 - DNA, 127 bp, synthetic construct
  source 1..127: mol_type = other DNA
acatttgttgatacaaccataaaatgataattacacccataaattgataattatcacacccataaattgaataagcctctgatcatagtcagaccaacattgctacgacccgtattcgcaccgacac

SEQ ID NO: 1319 - DNA, 127 bp, synthetic construct
  source 1..127: mol_type = other DNA
acatttgttgatacaaccataaaatgataattacacccataaattgataattatcacacccataaattgattaaccctctgatcatagtcagaccaacattgctacgacccgtattcgcaccgacac

SEQ ID NO: 1320 - DNA, 127 bp, synthetic construct
  source 1..127: mol_type = other DNA
acatttgttgatacaaccataaaatgataattacacccataaattgataattatcacacccataaattgataaacgctctgatcatagtcagaccaacattgctacgacccgtattcgcaccgacac

SEQ ID NO: 1321 - DNA, 127 bp, synthetic construct
  source 1..127: mol_type = other DNA
acatttgttgatacaaccataaaatgataattacacccataaattgataattatcacacccataaattgatatacggtctgatcatagtcagaccaacattgctacgacccgtattcgcaccgacac

SEQ ID NO: 1322 - DNA, 127 bp, synthetic construct
  source 1..127: mol_type = other DNA
acatttgttgatacaaccataaaatgataattacacccataaattgataattatcacacccataaattgatattcggactgatcatagtcagaccaacattgctacgacccgtattcgcaccgacac

SEQ ID NO: 1323 - DNA, 127 bp, synthetic construct
  source 1..127: mol_type = other DNA
acatttgttgatacaaccataaaatgataattacacccataaattgataattatcacacccataaattgatattgggagtgatcatagtcagaccaacattgctacgacccgtattcgcaccgacac

SEQ ID NO: 1324 - DNA, 127 bp, synthetic construct
  source 1..127: mol_type = other DNA
acatttgttgatacaaccataaaatgataattacacccataaattgataattatcacacccataaattgatattgcgagagatcatagtcagaccaacattgctacgacccgtattcgcaccgacac

SEQ ID NO: 1325 - DNA, 127 bp, synthetic construct
  source 1..127: mol_type = other DNA
cacgttgttgatacaaccataaaatgataattacacccataaattgataattatcacacccataaattgatattgcctctgatcatagtcagaccaacattgctacgacccgtattcgcaccgacac

SEQ ID NO: 1326 - DNA, 127 bp, synthetic construct
  source 1..127: mol_type = other DNA
aacggtgttgatacaaccataaaatgataattacacccataaattgataattatcacacccataaattgatattgcctctgatcatagtcagaccaacattgctacgacccgtattcgcaccgacac

SEQ ID NO: 1327 - DNA, 127 bp, synthetic construct
  source 1..127: mol_type = other DNA
accggggttgatacaaccataaaatgataattacacccataaattgataattatcacacccataaattgatattgcctctgatcatagtcagaccaacattgctacgacccgtattcgcaccgacac

SEQ ID NO: 1328 - DNA, 127 bp, synthetic construct
  source 1..127: mol_type = other DNA
acagggtttgatacaaccataaaatgataattacacccataaattgataattatcacacccataaattgatattgcctctgatcatagtcagaccaacattgctacgacccgtattcgcaccgacac

SEQ ID NO: 1329 - DNA, 127 bp, synthetic construct
  source 1..127: mol_type = other DNA
acatggtgtgatacaaccataaaatgataattacacccataaattgataattatcacacccataaattgatattgcctctgatcatagtcagaccaacattgctacgacccgtattcgcaccgacac

SEQ ID NO: 1330 - DNA, 127 bp, synthetic construct
  source 1..127: mol_type = other DNA
acattgtgggatacaaccataaaatgataattacacccataaattgataattatcacacccataaattgatattgcctctgatcatagtcagaccaacattgctacgacccgtattcgcaccgacac

SEQ ID NO: 1331 - DNA, 127 bp, synthetic construct
  source 1..127: mol_type = other DNA
acattttggtatacaaccataaaatgataattacacccataaattgataattatcacacccataaattgatattgcctctgatcatagtcagaccaacattgctacgacccgtattcgcaccgacac

SEQ ID NO: 1332 - DNA, 127 bp, synthetic construct
  source 1..127: mol_type = other DNA
acatttgggtctacaaccataaaatgataattacacccataaattgataattatcacacccataaattgatattgcctctgatcatagtcagaccaacattgctacgacccgtattcgcaccgacac

SEQ ID NO: 1333 - DNA, 127 bp, synthetic construct
  source 1..127: mol_type = other DNA
acatttgtgtcgacaaccataaaatgataattacacccataaattgataattatcacacccataaattgatattgcctctgatcatagtcagaccaacattgctacgacccgtattcgcaccgacac

SEQ ID NO: 1334 - DNA, 127 bp, synthetic construct
  source 1..127: mol_type = other DNA
acatttgtttcgccaaccataaaatgataattacacccataaattgataattatcacacccataaattgatattgcctctgatcatagtcagaccaacattgctacgacccgtattcgcaccgacac

SEQ ID NO: 1335 - DNA, 127 bp, synthetic construct
  source 1..127: mol_type = other DNA
acatttgttgcgcaaaccataaaatgataattacacccataaattgataattatcacacccataaattgatattgcctctgatcatagtcagaccaacattgctacgacccgtattcgcaccgacac

SEQ ID NO: 1336 - DNA, 127 bp, synthetic construct
  source 1..127: mol_type = other DNA
acatttgttgagcacaccataaaatgataattacacccataaattgataattatcacacccataaattgatattgcctctgatcatagtcagaccaacattgctacgacccgtattcgcaccgacac

SEQ ID NO: 1337 - DNA, 127 bp, synthetic construct
  source 1..127: mol_type = other DNA
acatttgttgatcaccccataaaatgataattacacccataaattgataattatcacacccataaattgatattgcctctgatcatagtcagaccaacattgctacgacccgtattcgcaccgacac

SEQ ID NO: 1338 - DNA, 127 bp, synthetic construct
  source 1..127: mol_type = other DNA
acatttgttgataaccacataaaatgataattacacccataaattgataattatcacacccataaattgatattgcctctgatcatagtcagaccaacattgctacgacccgtattcgcaccgacac

SEQ ID NO: 1339 - DNA, 127 bp, synthetic construct
  source 1..127: mol_type = other DNA
acatttgttgatacccaaataaaatgataattacacccataaattgataattatcacacccataaattgatattgcctctgatcatagtcagaccaacattgctacgacccgtattcgcaccgacac

SEQ ID NO: 1340 - DNA, 127 bp, synthetic construct
  source 1..127: mol_type = other DNA
acatttgttgatacacaactaaaatgataattacacccataaattgataattatcacacccataaattgatattgcctctgatcatagtcagaccaacattgctacgacccgtattcgcaccgacac

SEQ ID NO: 1341 - DNA, 127 bp, synthetic construct
  source 1..127: mol_type = other DNA
acatttgttgatacaaaacgaaaatgataattacacccataaattgataattatcacacccataaattgatattgcctctgatcatagtcagaccaacattgctacgacccgtattcgcaccgacac

SEQ ID NO: 1342 - DNA, 127 bp, synthetic construct
  source 1..127: mol_type = other DNA
acatttgttgatacaacacgcaaatgataattacacccataaattgataattatcacacccataaattgatattgcctctgatcatagtcagaccaacattgctacgacccgtattcgcaccgacac

SEQ ID NO: 1343 - DNA, 127 bp, synthetic construct
  source 1..127: mol_type = other DNA
acatttgttgatacaacccgccaatgataattacacccataaattgataattatcacacccataaattgatattgcctctgatcatagtcagaccaacattgctacgacccgtattcgcaccgacac

SEQ ID NO: 1344 - DNA, 127 bp, synthetic construct
  source 1..127: mol_type = other DNA
acatttgttgatacaaccagcccatgataattacacccataaattgataattatcacacccataaattgatattgcctctgatcatagtcagaccaacattgctacgacccgtattcgcaccgacac

SEQ ID NO: 1345 - DNA, 127 bp, synthetic construct
  source 1..127: mol_type = other DNA
acatttgttgatacaaccatcccctgataattacacccataaattgataattatcacacccataaattgatattgcctctgatcatagtcagaccaacattgctacgacccgtattcgcaccgacac

SEQ ID NO: 1346 - DNA, 127 bp, synthetic construct
  source 1..127: mol_type = other DNA
acatttgttgatacaaccatacccggataattacacccataaattgataattatcacacccataaattgatattgcctctgatcatagtcagaccaacattgctacgacccgtattcgcaccgacac

SEQ ID NO: 1347 - DNA, 127 bp, synthetic construct
  source 1..127: mol_type = other DNA
acatttgttgatacaaccataaccgtataattacacccataaattgataattatcacacccataaattgatattgcctctgatcatagtcagaccaacattgctacgacccgtattcgcaccgacac

SEQ ID NO: 1348 - DNA, 127 bp, synthetic construct
  source 1..127: mol_type = other DNA
acatttgttgatacaaccataaacgtctaattacacccataaattgataattatcacacccataaattgatattgcctctgatcatagtcagaccaacattgctacgacccgtattcgcaccgacac

SEQ ID NO: 1349 - DNA, 127 bp, synthetic construct
  source 1..127: mol_type = other DNA
acatttgttgatacaaccataaaagtcgaattacacccataaattgataattatcacacccataaattgatattgcctctgatcatagtcagaccaacattgctacgacccgtattcgcaccgacac

SEQ ID NO: 1350 - DNA, 127 bp, synthetic construct
  source 1..127: mol_type = other DNA
acatttgttgatacaaccataaaattcgcattacacccataaattgataattatcacacccataaattgatattgcctctgatcatagtcagaccaacattgctacgacccgtattcgcaccgacac

SEQ ID NO: 1351 - DNA, 127 bp, synthetic construct
  source 1..127: mol_type = other DNA
acatttgttgatacaaccataaaatgcgccttacacccataaattgataattatcacacccataaattgatattgcctctgatcatagtcagaccaacattgctacgacccgtattcgcaccgacac

SEQ ID NO: 1352 - DNA, 127 bp, synthetic construct
  source 1..127: mol_type = other DNA
acatttgttgatacaaccataaaatgagccgtacacccataaattgataattatcacacccataaattgatattgcctctgatcatagtcagaccaacattgctacgacccgtattcgcaccgacac

SEQ ID NO: 1353 - DNA, 127 bp, synthetic construct
  source 1..127: mol_type = other DNA
acatttgttgatacaaccataaaatgatccggacacccataaattgataattatcacacccataaattgatattgcctctgatcatagtcagaccaacattgctacgacccgtattcgcaccgacac

SEQ ID NO: 1354 - DNA, 127 bp, synthetic construct
  source 1..127: mol_type = other DNA
acatttgttgatacaaccataaaatgatacggccacccataaattgataattatcacacccataaattgatattgcctctgatcatagtcagaccaacattgctacgacccgtattcgcaccgacac

SEQ ID NO: 1355 - DNA, 127 bp, synthetic construct
  source 1..127: mol_type = other DNA
acatttgttgatacaaccataaaatgataaggcaacccataaattgataattatcacacccataaattgatattgcctctgatcatagtcagaccaacattgctacgacccgtattcgcaccgacac

SEQ ID NO: 1356 - DNA, 127 bp, synthetic construct
  source 1..127: mol_type = other DNA
acatttgttgatacaaccataaaatgataatgcaccccataaattgataattatcacacccataaattgatattgcctctgatcatagtcagaccaacattgctacgacccgtattcgcaccgacac

SEQ ID NO: 1357 - DNA, 127 bp, synthetic construct
  source 1..127: mol_type = other DNA
acatttgttgatacaaccataaaatgataattcacaccataaattgataattatcacacccataaattgatattgcctctgatcatagtcagaccaacattgctacgacccgtattcgcaccgacac

SEQ ID NO: 1358 - DNA, 127 bp, synthetic construct
  source 1..127: mol_type = other DNA
acatttgttgatacaaccataaaatgataattaacaacataaattgataattatcacacccataaattgatattgcctctgatcatagtcagaccaacattgctacgacccgtattcgcaccgacac

SEQ ID NO: 1359 - DNA, 127 bp, synthetic construct
  source 1..127: mol_type = other DNA
acatttgttgatacaaccataaaatgataattaccaaaataaattgataattatcacacccataaattgatattgcctctgatcatagtcagaccaacattgctacgacccgtattcgcaccgacac

SEQ ID NO: 1360 - DNA, 127 bp, synthetic construct
  source 1..127: mol_type = other DNA
acatttgttgatacaaccataaaatgataattacaaaactaaattgataattatcacacccataaattgatattgcctctgatcatagtcagaccaacattgctacgacccgtattcgcaccgacac

SEQ ID NO: 1361 - DNA, 127 bp, synthetic construct
  source 1..127: mol_type = other DNA
acatttgttgatacaaccataaaatgataattacacaacgaaattgataattatcacacccataaattgatattgcctctgatcatagtcagaccaacattgctacgacccgtattcgcaccgacac

SEQ ID NO: 1362 - DNA, 127 bp, synthetic construct
  source 1..127: mol_type = other DNA
acatttgttgatacaaccataaaatgataattacaccacgcaattgataattatcacacccataaattgatattgcctctgatcatagtcagaccaacattgctacgacccgtattcgcaccgacac

SEQ ID NO: 1363 - DNA, 127 bp, synthetic construct
  source 1..127: mol_type = other DNA
acatttgttgatacaaccataaaatgataattacaccccgccattgataattatcacacccataaattgatattgcctctgatcatagtcagaccaacattgctacgacccgtattcgcaccgacac

SEQ ID NO: 1364 - DNA, 127 bp, synthetic construct
  source 1..127: mol_type = other DNA
acatttgttgatacaaccataaaatgataattacacccagcccttgataattatcacacccataaattgatattgcctctgatcatagtcagaccaacattgctacgacccgtattcgcaccgacac

SEQ ID NO: 1365 - DNA, 127 bp, synthetic construct
  source 1..127: mol_type = other DNA
acatttgttgatacaaccataaaatgataattacacccatcccgtgataattatcacacccataaattgatattgcctctgatcatagtcagaccaacattgctacgacccgtattcgcaccgacac

SEQ ID NO: 1366 - DNA, 127 bp, synthetic construct
  source 1..127: mol_type = other DNA
acatttgttgatacaaccataaaatgataattacacccataccgggataattatcacacccataaattgatattgcctctgatcatagtcagaccaacattgctacgacccgtattcgcaccgacac

SEQ ID NO: 1367 - DNA, 127 bp, synthetic construct
  source 1..127: mol_type = other DNA
acatttgttgatacaaccataaaatgataattacacccataacggtataattatcacacccataaattgatattgcctctgatcatagtcagaccaacattgctacgacccgtattcgcaccgacac

SEQ ID NO: 1368 - DNA, 127 bp, synthetic construct
  source 1..127: mol_type = other DNA
acatttgttgatacaaccataaaatgataattacacccataaaggtctaattatcacacccataaattgatattgcctctgatcatagtcagaccaacattgctacgacccgtattcgcaccgacac

SEQ ID NO: 1369 - DNA, 127 bp, synthetic construct
  source 1..127: mol_type = other DNA
acatttgttgatacaaccataaaatgataattacacccataaatgtcgaattatcacacccataaattgatattgcctctgatcatagtcagaccaacattgctacgacccgtattcgcaccgacac

SEQ ID NO: 1370 - DNA, 127 bp, synthetic construct
  source 1..127: mol_type = other DNA
acatttgttgatacaaccataaaatgataattacacccataaatttcgcattatcacacccataaattgatattgcctctgatcatagtcagaccaacattgctacgacccgtattcgcaccgacac

SEQ ID NO: 1371 - DNA, 127 bp, synthetic construct
  source 1..127: mol_type = other DNA
acatttgttgatacaaccataaaatgataattacacccataaattgcgccttatcacacccataaattgatattgcctctgatcatagtcagaccaacattgctacgacccgtattcgcaccgacac

SEQ ID NO: 1372 - DNA, 127 bp, synthetic construct
  source 1..127: mol_type = other DNA
acatttgttgatacaaccataaaatgataattacacccataaattgagccgtatcacacccataaattgatattgcctctgatcatagtcagaccaacattgctacgacccgtattcgcaccgacac

SEQ ID NO: 1373 - DNA, 127 bp, synthetic construct
  source 1..127: mol_type = other DNA
acatttgttgatacaaccataaaatgataattacacccataaattgatccggatcacacccataaattgatattgcctctgatcatagtcagaccaacattgctacgacccgtattcgcaccgacac

SEQ ID NO: 1374 - DNA, 127 bp, synthetic construct
  source 1..127: mol_type = other DNA
acatttgttgatacaaccataaaatgataattacacccataaattgatacggctcacacccataaattgatattgcctctgatcatagtcagaccaacattgctacgacccgtattcgcaccgacac

SEQ ID NO: 1375 - DNA, 127 bp, synthetic construct
  source 1..127: mol_type = other DNA
acatttgttgatacaaccataaaatgataattacacccataaattgataaggcgcacacccataaattgatattgcctctgatcatagtcagaccaacattgctacgacccgtattcgcaccgacac

SEQ ID NO: 1376 - DNA, 127 bp, synthetic construct
  source 1..127: mol_type = other DNA
acatttgttgatacaaccataaaatgataattacacccataaattgataatgcgaacacccataaattgatattgcctctgatcatagtcagaccaacattgctacgacccgtattcgcaccgacac

SEQ ID NO: 1377 - DNA, 127 bp, synthetic construct
  source 1..127: mol_type = other DNA
acatttgttgatacaaccataaaatgataattacacccataaattgataattcgaccacccataaattgatattgcctctgatcatagtcagaccaacattgctacgacccgtattcgcaccgacac

SEQ ID NO: 1378 - DNA, 127 bp, synthetic construct
  source 1..127: mol_type = other DNA
acatttgttgatacaaccataaaatgataattacacccataaattgataattagacaacccataaattgatattgcctctgatcatagtcagaccaacattgctacgacccgtattcgcaccgacac

SEQ ID NO: 1379 - DNA, 127 bp, synthetic construct
  source 1..127: mol_type = other DNA
acatttgttgatacaaccataaaatgataattacacccataaattgataattatacaccccataaattgatattgcctctgatcatagtcagaccaacattgctacgacccgtattcgcaccgacac

SEQ ID NO: 1380 - DNA, 127 bp, synthetic construct
  source 1..127: mol_type = other DNA
acatttgttgatacaaccataaaatgataattacacccataaattgataattatccacaccataaattgatattgcctctgatcatagtcagaccaacattgctacgacccgtattcgcaccgacac

SEQ ID NO: 1381 - DNA, 127 bp, synthetic construct
  source 1..127: mol_type = other DNA
acatttgttgatacaaccataaaatgataattacacccataaattgataattatcaacaacataaattgatattgcctctgatcatagtcagaccaacattgctacgacccgtattcgcaccgacac

SEQ ID NO: 1382 - DNA, 127 bp, synthetic construct
  source 1..127: mol_type = other DNA
acatttgttgatacaaccataaaatgataattacacccataaattgataattatcaccaaaataaattgatattgcctctgatcatagtcagaccaacattgctacgacccgtattcgcaccgacac

SEQ ID NO: 1383 - DNA, 127 bp, synthetic construct
  source 1..127: mol_type = other DNA
acatttgttgatacaaccataaaatgataattacacccataaattgataattatcacaaaactaaattgatattgcctctgatcatagtcagaccaacattgctacgacccgtattcgcaccgacac

SEQ ID NO: 1384 - DNA, 127 bp, synthetic construct
  source 1..127: mol_type = other DNA
acatttgttgatacaaccataaaatgataattacacccataaattgataattatcacacaacgaaattgatattgcctctgatcatagtcagaccaacattgctacgacccgtattcgcaccgacac

SEQ ID NO: 1385 - DNA, 127 bp, synthetic construct
  source 1..127: mol_type = other DNA
acatttgttgatacaaccataaaatgataattacacccataaattgataattatcacaccacgcaattgatattgcctctgatcatagtcagaccaacattgctacgacccgtattcgcaccgacac

SEQ ID NO: 1386 - DNA, 127 bp, synthetic construct
  source 1..127: mol_type = other DNA
acatttgttgatacaaccataaaatgataattacacccataaattgataattatcacaccccgccattgatattgcctctgatcatagtcagaccaacattgctacgacccgtattcgcaccgacac

SEQ ID NO: 1387 - DNA, 127 bp, synthetic construct
  source 1..127: mol_type = other DNA
acatttgttgatacaaccataaaatgataattacacccataaattgataattatcacacccagcccttgatattgcctctgatcatagtcagaccaacattgctacgacccgtattcgcaccgacac

SEQ ID NO: 1388 - DNA, 127 bp, synthetic construct
  source 1..127: mol_type = other DNA
acatttgttgatacaaccataaaatgataattacacccataaattgataattatcacacccatcccgtgatattgcctctgatcatagtcagaccaacattgctacgacccgtattcgcaccgacac

SEQ ID NO: 1389 - DNA, 127 bp, synthetic construct
  source 1..127: mol_type = other DNA
acatttgttgatacaaccataaaatgataattacacccataaattgataattatcacacccataccgggatattgcctctgatcatagtcagaccaacattgctacgacccgtattcgcaccgacac

SEQ ID NO: 1390 - DNA, 127 bp, synthetic construct
  source 1..127: mol_type = other DNA
acatttgttgatacaaccataaaatgataattacacccataaattgataattatcacacccataacggtatattgcctctgatcatagtcagaccaacattgctacgacccgtattcgcaccgacac

SEQ ID NO: 1391 - DNA, 127 bp, synthetic construct
  source 1..127: mol_type = other DNA
acatttgttgatacaaccataaaatgataattacacccataaattgataattatcacacccataaaggtctattgcctctgatcatagtcagaccaacattgctacgacccgtattcgcaccgacac

SEQ ID NO: 1392 - DNA, 127 bp, synthetic construct
  source 1..127: mol_type = other DNA
acatttgttgatacaaccataaaatgataattacacccataaattgataattatcacacccataaatgtcgattgcctctgatcatagtcagaccaacattgctacgacccgtattcgcaccgacac

SEQ ID NO: 1393 - DNA, 127 bp, synthetic construct
  source 1..127: mol_type = other DNA
acatttgttgatacaaccataaaatgataattacacccataaattgataattatcacacccataaatttcgcttgcctctgatcatagtcagaccaacattgctacgacccgtattcgcaccgacac

SEQ ID NO: 1394 - DNA, 127 bp, synthetic construct
  source 1..127: mol_type = other DNA
acatttgttgatacaaccataaaatgataattacacccataaattgataattatcacacccataaattgcgcgtgcctctgatcatagtcagaccaacattgctacgacccgtattcgcaccgacac

SEQ ID NO: 1395 - DNA, 127 bp, synthetic construct
  source 1..127: mol_type = other DNA
acatttgttgatacaaccataaaatgataattacacccataaattgataattatcacacccataaattgagcgggcctctgatcatagtcagaccaacattgctacgacccgtattcgcaccgacac

SEQ ID NO: 1396 - DNA, 127 bp, synthetic construct
  source 1..127: mol_type = other DNA
acatttgttgatacaaccataaaatgataattacacccataaattgataattatcacacccataaattgatcggtcctctgatcatagtcagaccaacattgctacgacccgtattcgcaccgacac

SEQ ID NO: 1397 - DNA, 127 bp, synthetic construct
  source 1..127: mol_type = other DNA
acatttgttgatacaaccataaaatgataattacacccataaattgataattatcacacccataaattgataggtactctgatcatagtcagaccaacattgctacgacccgtattcgcaccgacac

SEQ ID NO: 1398 - DNA, 127 bp, synthetic construct
  source 1..127: mol_type = other DNA
acatttgttgatacaaccataaaatgataattacacccataaattgataattatcacacccataaattgatatgtaatctgatcatagtcagaccaacattgctacgacccgtattcgcaccgacac

SEQ ID NO: 1399 - DNA, 127 bp, synthetic construct
  source 1..127: mol_type = other DNA
acatttgttgatacaaccataaaatgataattacacccataaattgataattatcacacccataaattgatatttaagctgatcatagtcagaccaacattgctacgacccgtattcgcaccgacac

SEQ ID NO: 1400 - DNA, 127 bp, synthetic construct
  source 1..127: mol_type = other DNA
acatttgttgatacaaccataaaatgataattacacccataaattgataattatcacacccataaattgatattgaagatgatcatagtcagaccaacattgctacgacccgtattcgcaccgacac

SEQ ID NO: 1401 - DNA, 127 bp, synthetic construct
  source 1..127: mol_type = other DNA
acatttgttgatacaaccataaaatgataattacacccataaattgataattatcacacccataaattgatattgcagaggatcatagtcagaccaacattgctacgacccgtattcgcaccgacac

SEQ ID NO: 1402 - DNA, 127 bp, synthetic construct
  source 1..127: mol_type = other DNA
caaaatgtaaaaaaaaccatacgttgattttacgaaaccatacgctgaaataaaaacaaccataccttgaaattgcttataaagtgtacaacacttgagaaagtttactacaggtatgcaccgacac

SEQ ID NO: 1403 - DNA, 127 bp, synthetic construct
  source 1..127: mol_type = other DNA
acatttgtaaaaaaaaccatacgttgattttacgaaaccatacgctgaaataaaaacaaccataccttgaaattgcttataaagtgtacaacacttgagaaagtttactacaggtatgcaccgacac

SEQ ID NO: 1404 - DNA, 127 bp, synthetic construct
  source 1..127: mol_type = other DNA
caaaatgttgataaaaccatacgttgattttacgaaaccatacgctgaaataaaaacaaccataccttgaaattgcttataaagtgtacaacacttgagaaagtttactacaggtatgcaccgacac

SEQ ID NO: 1405 - DNA, 127 bp, synthetic construct
  source 1..127: mol_type = other DNA
caaaatgtaaaaacaaccataaaatgataattagaaaccatacgctgaaataaaaacaaccataccttgaaattgcttataaagtgtacaacacttgagaaagtttactacaggtatgcaccgacac

SEQ ID NO: 1406 - DNA, 127 bp, synthetic construct
  source 1..127: mol_type = other DNA
caaaatgtaaaaaaaaccatacgttgattttaccacccataaattgataattaaaacaaccataccttgaaattgcttataaagtgtacaacacttgagaaagtttactacaggtatgcaccgacac

SEQ ID NO: 1407 - DNA, 127 bp, synthetic construct
  source 1..127: mol_type = other DNA
caaaatgtaaaaaaaaccatacgttgattttacgaaaccatacgctgaaataatcacaaccataccttgaaattgcttataaagtgtacaacacttgagaaagtttactacaggtatgcaccgacac

SEQ ID NO: 1408 - DNA, 127 bp, synthetic construct
  source 1..127: mol_type = other DNA
caaaatgtaaaaaaaaccatacgttgattttacgaaaccatacgctgaaataaaaacacccataaattgatattgcttataaagtgtacaacacttgagaaagtttactacaggtatgcaccgacac

SEQ ID NO: 1409 - DNA, 127 bp, synthetic construct
  source 1..127: mol_type = other DNA
caaaatgtaaaaaaaaccatacgttgattttacgaaaccatacgctgaaataaaaacaaccataccttgaaattgcctctaaagtgtacaacacttgagaaagtttactacaggtatgcaccgacac

SEQ ID NO: 1410 - DNA, 127 bp, synthetic construct
  source 1..127: mol_type = other DNA
caaaatgtaaaaaaaaccatacgttgattttacgaaaccatacgctgaaataaaaacaaccataccttgaaattgcttatgatcatagtcagaccaacattgctacgacccgtattcgcaccgacac

SEQ ID NO: 1411 - DNA, 127 bp, synthetic construct
  source 1..127: mol_type = other DNA
caaaatgttgatacaaccataaaatgataattacacccataaattgataattatcacacccataaattgatattgcctctgatcatagtcagaccaacattgctacgacccgtattcgcaccgacac

SEQ ID NO: 1412 - DNA, 127 bp, synthetic construct
  source 1..127: mol_type = other DNA
acatttgtaaaaacaaccataaaatgataattacacccataaattgataattatcacacccataaattgatattgcctctgatcatagtcagaccaacattgctacgacccgtattcgcaccgacac

SEQ ID NO: 1413 - DNA, 127 bp, synthetic construct
  source 1..127: mol_type = other DNA
acatttgttgataaaaccatacgttgattttaccacccataaattgataattatcacacccataaattgatattgcctctgatcatagtcagaccaacattgctacgacccgtattcgcaccgacac

SEQ ID NO: 1414 - DNA, 127 bp, synthetic construct
  source 1..127: mol_type = other DNA
acatttgttgatacaaccataaaatgataattagaaaccatacgctgaaataatcacacccataaattgatattgcctctgatcatagtcagaccaacattgctacgacccgtattcgcaccgacac

SEQ ID NO: 1415 - DNA, 127 bp, synthetic construct
  source 1..127: mol_type = other DNA
acatttgttgatacaaccataaaatgataattacacccataaattgataattaaaacacccataaattgatattgcctctgatcatagtcagaccaacattgctacgacccgtattcgcaccgacac

SEQ ID NO: 1416 - DNA, 127 bp, synthetic construct
  source 1..127: mol_type = other DNA
acatttgttgatacaaccataaaatgataattacacccataaattgataattatcacaaccataccttgaaattgcctctgatcatagtcagaccaacattgctacgacccgtattcgcaccgacac

SEQ ID NO: 1417 - DNA, 127 bp, synthetic construct
  source 1..127: mol_type = other DNA
acatttgttgatacaaccataaaatgataattacacccataaattgataattatcacacccataaattgatattgcttatgatcatagtcagaccaacattgctacgacccgtattcgcaccgacac

SEQ ID NO: 1418 - DNA, 127 bp, synthetic construct
  source 1..127: mol_type = other DNA
acatttgttgatacaaccataaaatgataattacacccataaattgataattatcacacccataaattgatattgcctctaaagtgtacaacacttgagaaagtttactacaggtatgcaccgacac

SEQ ID NO: 1419 - DNA, 127 bp, synthetic construct
  source 1..127: mol_type = other DNA
acatttgtaaaaaaaaccatacgttgattttacgaaaccatacgctgaaataaaaacaaccataccttgaaattgcttatgatcatagtcagaccaacattgctacgacccgtattcgcaccgacac

SEQ ID NO: 1420 - DNA, 127 bp, synthetic construct
  source 1..127: mol_type = other DNA
acatttgtaaaaaaaaccatacgttgattttacgaaaccatacgctgaaataaaaacaaccataccttgaaattgcctctgatcatagtcagaccaacattgctacgacccgtattcgcaccgacac

SEQ ID NO: 1421 - DNA, 127 bp, synthetic construct
  source 1..127: mol_type = other DNA
acatttgtaaaaaaaaccatacgttgattttacgaaaccatacgctgaaataatcacaaccataccttgaaattgcctctgatcatagtcagaccaacattgctacgacccgtattcgcaccgacac

SEQ ID NO: 1422 - DNA, 127 bp, synthetic construct
  source 1..127: mol_type = other DNA
acatttgtaaaaaaaaccatacgttgattttacgaaaccatacgctgaaataatcacaaccataacttgaaattgcctctgatcatagtcagaccaacattgctacgacccgtattcgcaccgacac

SEQ ID NO: 1423 - DNA, 127 bp, synthetic construct
  source 1..127: mol_type = other DNA
acatttgtaaaaaaaaccatacgttgattttacgaaaccatacgctgaaataatcacaaccatacattgaaattgcctctgatcatagtcagaccaacattgctacgacccgtattcgcaccgacac

SEQ ID NO: 1424 - DNA, 127 bp, synthetic construct
  source 1..127: mol_type = other DNA
acatttgtaaaaaaaaccatacgttgattttacgaaaccatacgctgaaataatcacaaccataaattgaaattgcctctgatcatagtcagaccaacattgctacgacccgtattcgcaccgacac

SEQ ID NO: 1425 - DNA, 127 bp, synthetic construct
  source 1..127: mol_type = other DNA
acatttgtaaaaaaaaccatacgttgattttacgaaaccatacgctgaaataatcacacccataaattgaaattgcctctgatcatagtcagaccaacattgctacgacccgtattcgcaccgacac

SEQ ID NO: 1426 - DNA, 127 bp, synthetic construct
  source 1..127: mol_type = other DNA
acatttgtaaaaaaaaccatacgttgattttacgaaaccatacgctgaaataatcacaaccataaattgatattgcctctgatcatagtcagaccaacattgctacgacccgtattcgcaccgacac

SEQ ID NO: 1427 - DNA, 127 bp, synthetic construct
  source 1..127: mol_type = other DNA
acatttgtaaaaaaaaccatacgttgattttacgaaaccatacgctgaaataatcacacccataaattgatattgcctctgatcatagtcagaccaacattgctacgacccgtattcgcaccgacac

SEQ ID NO: 1428 - DNA, 127 bp, synthetic construct
  source 1..127: mol_type = other DNA
acatttgttaaaaaaaccatacgttgattttacgaaaccatacgctgaaataatcacacccataaattgatattgcctctgatcatagtcagaccaacattgctacgacccgtattcgcaccgacac

SEQ ID NO: 1429 - DNA, 127 bp, synthetic construct
  source 1..127: mol_type = other DNA
acatttgtagaaaaaaccatacgttgattttacgaaaccatacgctgaaataatcacacccataaattgatattgcctctgatcatagtcagaccaacattgctacgacccgtattcgcaccgacac

SEQ ID NO: 1430 - DNA, 127 bp, synthetic construct
  source 1..127: mol_type = other DNA
acatttgtaaataaaaccatacgttgattttacgaaaccatacgctgaaataatcacacccataaattgatattgcctctgatcatagtcagaccaacattgctacgacccgtattcgcaccgacac

SEQ ID NO: 1431 - DNA, 127 bp, synthetic construct
  source 1..127: mol_type = other DNA
acatttgttgaaaaaaccatacgttgattttacgaaaccatacgctgaaataatcacacccataaattgatattgcctctgatcatagtcagaccaacattgctacgacccgtattcgcaccgacac

SEQ ID NO: 1432 - DNA, 127 bp, synthetic construct
  source 1..127: mol_type = other DNA
acatttgtagataaaaccatacgttgattttacgaaaccatacgctgaaataatcacacccataaattgatattgcctctgatcatagtcagaccaacattgctacgacccgtattcgcaccgacac

SEQ ID NO: 1433 - DNA, 127 bp, synthetic construct
  source 1..127: mol_type = other DNA
acatttgttaataaaaccatacgttgattttacgaaaccatacgctgaaataatcacacccataaattgatattgcctctgatcatagtcagaccaacattgctacgacccgtattcgcaccgacac

SEQ ID NO: 1434 - DNA, 127 bp, synthetic construct
  source 1..127: mol_type = other DNA
acatttgttgataaaaccatacgttgattttacgaaaccatacgctgaaataatcacacccataaattgatattgcctctgatcatagtcagaccaacattgctacgacccgtattcgcaccgacac

SEQ ID NO: 1435 - DNA, 127 bp, synthetic construct
  source 1..127: mol_type = other DNA
acatttgttgataaaaccatacgttgattttaagaaaccatacgctgaaataatcacacccataaattgatattgcctctgatcatagtcagaccaacattgctacgacccgtattcgcaccgacac

SEQ ID NO: 1436 - DNA, 127 bp, synthetic construct
  source 1..127: mol_type = other DNA
acatttgttgataaaaccataaaatgattttaagaaaccataatctgaaataatcacacccataaattgatattgcctctgatcatagtcagaccaacattgctacgacccgtattcgcaccgacac

SEQ ID NO: 1437 - DNA, 127 bp, synthetic construct
  source 1..127: mol_type = other DNA
acatttgttgataaaaccataaaatgatttttagaaaccataatctgaaattatcacacccataaattgatattgcctctgatcatagtcagaccaacattgctacgacccgtattcgcaccgacac

SEQ ID NO: 1438 - DNA, 127 bp, synthetic construct
  source 1..127: mol_type = other DNA
acatttgttgataaaaccataaaatgattattagaaaccataatctgaaattatcacacccataaattgatattgcctctgatcatagtcagaccaacattgctacgacccgtattcgcaccgacac

SEQ ID NO: 1439 - DNA, 127 bp, synthetic construct
  source 1..127: mol_type = other DNA
acatttgttgataaaaccataaaatgataattagacccataaattgataattatcacacccataaattgatattgcctctgatcatagtcagaccaacattgctacgacccgtattcgcaccgacac

SEQ ID NO: 1440 - DNA, 127 bp, synthetic construct
  source 1..127: mol_type = other DNA
acatttgttgataaaaccataaaatgattattacacccataaattgataattatcacacccataaattgatattgcctctgatcatagtcagaccaacattgctacgacccgtattcgcaccgacac

SEQ ID NO: 1441 - DNA, 127 bp, synthetic construct
  source 1..127: mol_type = other DNA
acatttgttgatacaaccataaaatgataattagaaaccataattgataattatcacacccataaattgatattgcctctgatcatagtcagaccaacattgctacgacccgtattcgcaccgacac

SEQ ID NO: 1442 - DNA, 127 bp, synthetic construct
  source 1..127: mol_type = other DNA
acatttgttgatacaaccataaaatgataattacacccataaatctgaaattatcacacccataaattgatattgcctctgatcatagtcagaccaacattgctacgacccgtattcgcaccgacac

SEQ ID NO: 1443 - DNA, 127 bp, synthetic construct
  source 1..127: mol_type = other DNA
acatttgttgatacaaccataaaatgataattagaccccataattgataattatcacacccataaattgatattgcctctgatcatagtcagaccaacattgctacgacccgtattcgcaccgacac

SEQ ID NO: 1444 - DNA, 127 bp, synthetic construct
  source 1..127: mol_type = other DNA
acatttgttgatacaaccataaaatgataattacacccataaattgataattatcacacccataaattgatattgcctcttcatggtctaaacttcagtaagtttacgacattttcagcaccgacac

SEQ ID NO: 1445 - DNA, 127 bp, synthetic construct
  source 1..127: mol_type = other DNA
acatttgttgatacaaccataaaatgataattacacccataaattgataattatcacacccataaattgatattgcctcttcatgtgagcccaggcagtaagtttacgacattttcagcaccgacac

SEQ ID NO: 1446 - DNA, 127 bp, synthetic construct
  source 1..127: mol_type = other DNA
acatttgttgatacaaccataaaatgataattacacccataaattgataattatcacacccataaattgatattgcctcttcatggtctaaacttcagtcctgggcatcaattttcagcaccgacac

SEQ ID NO: 1447 - DNA, 127 bp, synthetic construct
  source 1..127: mol_type = other DNA
acatttgttgatacaaccataaaatgataattacacccataaattgataattatcacacccataaattgatattgcctcttcatgtgagcccaggcagtcctgggcatcaattttcagcaccgacac

SEQ ID NO: 1448 - DNA, 127 bp, synthetic construct
  source 1..127: mol_type = other DNA
acatttgttgatacaaccataaaatgataattacacccataaattgataattatcacacccataaattgatattgcctcttcatgcagatttgaacagtaagtttacgacattttcagcaccgacac

SEQ ID NO: 1449 - DNA, 127 bp, synthetic construct
  source 1..127: mol_type = other DNA
acatttgttgatacaaccataaaatgataattacacccataaattgataattatcacacccataaattgatattgcctcttcatggtctaaacttcagtttcaaatgctgattttcagcaccgacac

SEQ ID NO: 1450 - DNA, 127 bp, synthetic construct
  source 1..127: mol_type = other DNA
acatttgttgatacaaccataaaatgataattacacccataaattgataattatcacacccataaattgatattgcctcttcatgcagatttgaacagtttcaaatgctgattttcagcaccgacac

SEQ ID NO: 1451 - DNA, 127 bp, synthetic construct
  source 1..127: mol_type = other DNA
acatttgttgatacaaccataaaatgataattacacccataaattgataattatcacacccataaattgatattgcctctgacttaaacaaaatatatcttgcccgccttacaaatagcaccgacac

SEQ ID NO: 1452 - DNA, 127 bp, synthetic construct
  source 1..127: mol_type = other DNA
acatttgttgatacaaccataaaatgataattacacccataaattgataattatcacacccataaattgatattgcctctacatgaattcaaagttatgtaatatagtactatgtacgcaccgacac

SEQ ID NO: 1453 - DNA, 127 bp, synthetic construct
  source 1..127: mol_type = other DNA
acatttgttgatacaaccataaaatgataattacacccataaattgataattatcacacccataaattgatattgcctcttaacacccgtattacttcataatcgtttgtaattcaagcaccgacac

SEQ ID NO: 1454 - DNA, 127 bp, synthetic construct
  source 1..127: mol_type = other DNA
acatttgttgatacaaccataaaatgataattacacccataaattgataattatcacacccataaattgatattgcctctatgtacactgatgagttattacacctcaagttcaatggcaccgacac

SEQ ID NO: 1455 - DNA, 127 bp, synthetic construct
  source 1..127: mol_type = other DNA
acatttgttgatacaaccataaaatgataattacacccataaattgataattatcacacccataaattgatattgcctctagcttgatctacattggattgccattctctcacagtagcaccgacac

SEQ ID NO: 1456 - DNA, 127 bp, synthetic construct
  source 1..127: mol_type = other DNA
acatttgttgatacaaccataaaatgataattacacccataaattgataattatcacacccataaattgatattgcctctttatgcaggacgacgtacgcgttccatataaacctgtgcaccgacac

SEQ ID NO: 1457 - DNA, 127 bp, synthetic construct
  source 1..127: mol_type = other DNA
acatttgttgatacaaccataaaatgataattacacccataaattgataattatcacacccataaattgatattgcctcttctttgctcacgcatctagtcggtccacgtttggttcgcaccgacac

SEQ ID NO: 1458 - DNA, 127 bp, synthetic construct
  source 1..127: mol_type = other DNA
acatttgttgatacaaccataaaatgataattacacccataaattgataattatcacacccataaattgatattgcctctgtacgatccagtgatctccaagacgctgcaagagtccgcaccgacac

SEQ ID NO: 1459 - DNA, 127 bp, synthetic construct
  source 1..127: mol_type = other DNA
acatttgttgatacaaccataaaatgataattacacccataaattgataattatcacacccataaattgatattgcctctcagaccacatagctgccatgtcctgatcggacggaccgcaccgacac

SEQ ID NO: 1460 - DNA, 127 bp, synthetic construct
  source 1..127: mol_type = other DNA
acatttgttgatacaaccataaaatgataattacacccataaattgataattatcacacccataaattgatattgcctctccgacccggaagagggcgcctagaattgggagtggtcgcaccgacac

SEQ ID NO: 1461 - DNA, 127 bp, synthetic construct
  source 1..127: mol_type = other DNA
acatttgttgatacaaccataaaatgataattacacccataaattgataattatcacacccataaattgatattgcctctgttggcgcccggccctcaggccctgcagtgagttccagcaccgacac

SEQ ID NO: 1462 - DNA, 127 bp, synthetic construct
  source 1..127: mol_type = other DNA
acatttgttgatacaaccataaaatgataattacacccataaattgataattatcacacccataaattgatattgcctctggcgctctgtaccccgctcggtcctcccgcgcatcgcgcaccgacac

SEQ ID NO: 1463 - DNA, 127 bp, synthetic construct
  source 1..127: mol_type = other DNA
acatttgttgatacaaccataaaatgataattacacccataaattgataattatcacacccataaattgatattgcctctcgcgagaggccggcagccgtctggcgtcgggtggcgggcaccgacac

SEQ ID NO: 1464 - DNA, 127 bp, synthetic construct
  source 1..127: mol_type = other DNA
acatttgttgatacaaccataaaatgataattacacccataaattgataattatcacacccataaattgatattgcctctttgtgagcggataacaagatcatagtcagaccaacatgcaccgacac

SEQ ID NO: 1465 - DNA, 127 bp, synthetic construct
  source 1..127: mol_type = other DNA
acatttgttgatacaaccataaaatgataattacacccataaattgataattatcacacccataaattgatattgcctctgatcatagtcttgtgagcggataacaaagaccaacatgcaccgacac

SEQ ID NO: 1466 - DNA, 127 bp, synthetic construct
  source 1..127: mol_type = other DNA
acatttgttgatacaaccataaaatgataattacacccataaattgataattatcacacccataaattgatattgcctctgatcatagtcagaccaacatttgtgagcggataacaagcaccgacac

SEQ ID NO: 1467 - DNA, 127 bp, synthetic construct
  source 1..127: mol_type = other DNA
acatttgttgatacaaccataaaatgataattacacccataaattgataattatcacacccataaattgatattgcctctgatcaaattgtgagcggataacaatttagtcagaccagcaccgacac

SEQ ID NO: 1468 - DNA, 127 bp, synthetic construct
  source 1..127: mol_type = other DNA
acatttgttgatacaaccataaaatgataattacacccataaattgataattatcacacccataaattgatattgcctctgatcaaaatgtgagcgagtaacaacctagtcagaccagcaccgacac

SEQ ID NO: 1469 - DNA, 127 bp, synthetic construct
  source 1..127: mol_type = other DNA
acatttgttgatacaaccataaaatgataattacacccataaattgataattatcacacccataaattgatattgcctctgatcaggcagtgagcgcaacgcaatttagtcagaccagcaccgacac

SEQ ID NO: 1470 - DNA, 127 bp, synthetic construct
  source 1..127: mol_type = other DNA
acatttgttgatacaaccataaaatgataattacacccataaattgataattatcacacccataaattgatattgcctctgtttatggctagctcagtcctaggtacaatgctagccgcaccgacac

SEQ ID NO: 1471 - DNA, 127 bp, synthetic construct
  source 1..127: mol_type = other DNA
acatttgttgatacaaccataaaatgataattacacccataaattgataattatcacacccataaattgatattgcctctgttgacggctagctcagtcctaggtatagtgctagccgcaccgacac

SEQ ID NO: 1472 - DNA, 127 bp, synthetic construct
  source 1..127: mol_type = other DNA
acatttgttgatacaaccataaaatgataattacacccataaattgataattatcacacccataaattgatattgcctctgttgacagctagctcagtcctaggtataatgctagccgcaccgacac

SEQ ID NO: 1473 - DNA, 127 bp, synthetic construct
  source 1..127: mol_type = other DNA
acatttgttgatacaaccataaaatgataattacacccataaattgataattatcacacccataaattgatattgcctctggctagcattgtacctaggactgagctagccataaacgcaccgacac

SEQ ID NO: 1474 - DNA, 127 bp, synthetic construct
  source 1..127: mol_type = other DNA
acatttgttgatacaaccataaaatgataattacacccataaattgataattatcacacccataaattgatattgcctctggctagcactatacctaggactgagctagccgtcaacgcaccgacac

SEQ ID NO: 1475 - DNA, 127 bp, synthetic construct
  source 1..127: mol_type = other DNA
acatttgttgatacaaccataaaatgataattacacccataaattgataattatcacacccataaattgatattgcctctggctagcattatacctaggactgagctagctgtcaacgcaccgacac

SEQ ID NO: 1476 - DNA, 127 bp, synthetic construct
  source 1..127: mol_type = other DNA
acatttgttgatacaaccataaaatgataattacacccataaattgataattatcacacccataaattgatattgcctctgataacttcgtatagcatacattatacgaagttattcgcaccgacac

SEQ ID NO: 1477 - DNA, 127 bp, synthetic construct
  source 1..127: mol_type = other DNA
acatttgttgatacaaccataaaatgataattacacccataaattgataattatcacacccataaattgatattgcctctgataacttcgtatagtataccttatacgaagttattcgcaccgacac

SEQ ID NO: 1478 - DNA, 127 bp, synthetic construct
  source 1..127: mol_type = other DNA
acatttgttgatacaaccataaaatgataattacacccataaattgataattatcacacccataaattgatattgcctctgataacttcgtataggatactttatacgaagttattcgcaccgacac

SEQ ID NO: 1479 - DNA, 127 bp, synthetic construct
  source 1..127: mol_type = other DNA
acatttgttgatacaaccataaaatgataattacacccataaattgataattatcacacccataaattgatattgcctctgataacttcgtatagtatacattatacgaagttattcgcaccgacac

SEQ ID NO: 1480 - DNA, 127 bp, synthetic construct
  source 1..127: mol_type = other DNA
acatttgttgatacaaccataaaatgataattacacccataaattgataattatcacacccataaattgatattgcctctgataacttggtatagcatacattatacgaacggtatcgcaccgacac

SEQ ID NO: 1481 - DNA, 127 bp, synthetic construct
  source 1..127: mol_type = other DNA
acatttgttgatacaaccataaaatgataattacacccataaattgataattatcacacccataaattgatattgcctctgtaccgttcgtatacgatacattatacgaagttattcgcaccgacac

SEQ ID NO: 1482 - DNA, 127 bp, synthetic construct
  source 1..127: mol_type = other DNA
acatttgttgatacaaccataaaatgataattacacccataaattgataattatcacacccataaattgatattgcctctgataacttcgtataatgtatgctatacgaagttattcgcaccgacac

SEQ ID NO: 1483 - DNA, 127 bp, synthetic construct
  source 1..127: mol_type = other DNA
acatttgttgatacaaccataaaatgataattacacccataaattgataattatcacacccataaattgatattgcctctgataacttcgtataaggtatactatacgaagttattcgcaccgacac

SEQ ID NO: 1484 - DNA, 127 bp, synthetic construct
  source 1..127: mol_type = other DNA
acatttgttgatacaaccataaaatgataattacacccataaattgataattatcacacccataaattgatattgcctctgataacttcgtataaagtatcctatacgaagttattcgcaccgacac

SEQ ID NO: 1485 - DNA, 127 bp, synthetic construct
  source 1..127: mol_type = other DNA
acatttgttgatacaaccataaaatgataattacacccataaattgataattatcacacccataaattgatattgcctctgataacttcgtataatgtatactatacgaagttattcgcaccgacac

SEQ ID NO: 1486 - DNA, 127 bp, synthetic construct
  source 1..127: mol_type = other DNA
acatttgttgatacaaccataaaatgataattacacccataaattgataattatcacacccataaattgatattgcctctgtaccgttcgtataatgtatgctataccaagttattcgcaccgacac

SEQ ID NO: 1487 - DNA, 127 bp, synthetic construct
  source 1..127: mol_type = other DNA
acatttgttgatacaaccataaaatgataattacacccataaattgataattatcacacccataaattgatattgcctctgataacttcgtataatgtatcgtatacgaacggtatcgcaccgacac

SEQ ID NO: 1488 - DNA, 127 bp, synthetic construct
  source 1..127: mol_type = other DNA
acatttgttgatacaaccataaaatgataattacacccataaattgataattatcacacccataaattgatattgcctctgatagtactgcgcgcctgaattcatcgttaaatcgtcgcaccgacac

SEQ ID NO: 1489 - DNA, 127 bp, synthetic construct
  source 1..127: mol_type = other DNA
acatttgttgatacaaccataaaatgataattacacccataaattgataattatcacacccataaattgatattgcctctgatcgttttaaggatgacttcagtcgcgccgtacttcgcaccgacac

SEQ ID NO: 1490 - DNA, 127 bp, synthetic construct
  source 1..127: mol_type = other DNA
acatttgttgatacaaccataaaatgataattacacccataaattgataattatcacacccataaattgatattgcctctgatcaggaattgtgagcggataacaatttagtcagacgcaccgacac

SEQ ID NO: 1491 - DNA, 127 bp, synthetic construct
  source 1..127: mol_type = other DNA
acatttgttgatacaaccataaaatgataattacacccataaattgataattatcacacccataaattgatattgcctctgatcatagtcagctgaagcgagacaccgaccaacattgcaccgacac

SEQ ID NO: 1492 - DNA, 127 bp, synthetic construct
  source 1..127: mol_type = other DNA
acatttgttgatacaaccataaaatgataattacacccataaattgataattatcacacccataaattgatattgcctctgatcataaatatataaattaattattaaattagtcaggcaccgacac

SEQ ID NO: 1493 - DNA, 127 bp, synthetic construct
  source 1..127: mol_type = other DNA
acatttgttgatacaaccataaaatgataattacacccataaattgataattatcacacccataaattgatattgcctctgatcatttacttttggttacatatttagtcagaccaagcaccgacac

SEQ ID NO: 1494 - DNA, 127 bp, synthetic construct
  source 1..127: mol_type = other DNA
acatttgttgatacaaccataaaatgataattacacccataaattgataattatcacacccataaattgatattgcctctgatcatagtctgtgattgttatcacatttcagaccaagcaccgacac

SEQ ID NO: 1495 - DNA, 127 bp, synthetic construct
  source 1..127: mol_type = other DNA
acatttgttgatacaaccataaaatgataattacacccataaattgataattatcacacccataaattgatattgcctctgatcatagtcagatgaatttttatgcaaagaccaacagcaccgacac

SEQ ID NO: 1496 - DNA, 127 bp, synthetic construct
  source 1..127: mol_type = other DNA
acatttgttgatacaaccataaaatgataattacacccataaattgataattatcacacccataaattgatattgcctctgatcatagtcaactgtatataaatacagttcagaccagcaccgacac

SEQ ID NO: 1497 - DNA, 127 bp, synthetic construct
  source 1..127: mol_type = other DNA
acatttgttgatacaaccataaaatgataattacacccataaattgataattatcacacccataaattgatattgcctctgatcatagcgtactagttaactagttcgagtcagaccgcaccgacac

SEQ ID NO: 1498 - DNA, 127 bp, synthetic construct
  source 1..127: mol_type = other DNA
acatttgttgatacaaccataaaatgataattacacccataaattgataattatcacacccataaattgatattgcctctgatcataattgttatccgctcacaattccagtcagacgcaccgacac

SEQ ID NO: 1499 - DNA, 127 bp, synthetic construct
  source 1..127: mol_type = other DNA
acatttgttgatacaaccataaaatgataattacacccataaattgataattatcacacccataaattgatattgcctctgatcatggtgtctcgcttcagcagtcagaccaacattgcaccgacac

SEQ ID NO: 1500 - DNA, 127 bp, synthetic construct
  source 1..127: mol_type = other DNA
acatttgttgatacaaccataaaatgataattacacccataaattgataattatcacacccataaattgatattgcctctgatcatatttaataattaatttatatatttaagtcaggcaccgacac

SEQ ID NO: 1501 - DNA, 127 bp, synthetic construct
  source 1..127: mol_type = other DNA
acatttgttgatacaaccataaaatgataattacacccataaattgataattatcacacccataaattgatattgcctctgatcaatatgtaaccaaaagtaaaatagtcagaccaagcaccgacac

SEQ ID NO: 1502 - DNA, 127 bp, synthetic construct
  source 1..127: mol_type = other DNA
acatttgttgatacaaccataaaatgataattacacccataaattgataattatcacacccataaattgatattgcctctgatcatagtcaatgtgataacaatcacagaagaccaagcaccgacac

SEQ ID NO: 1503 - DNA, 127 bp, synthetic construct
  source 1..127: mol_type = other DNA
acatttgttgatacaaccataaaatgataattacacccataaattgataattatcacacccataaattgatattgcctctgatcatttgcataaaaattcatctagtcagaccaacagcaccgacac

SEQ ID NO: 1504 - DNA, 127 bp, synthetic construct
  source 1..127: mol_type = other DNA
acatttgttgatacaaccataaaatgataattacacccataaattgataattatcacacccataaattgatattgcctctgatcatagtcaaactgtatttatatacagttggaccagcaccgacac

SEQ ID NO: 1505 - DNA, 127 bp, synthetic construct
  source 1..127: mol_type = other DNA
acatttgttgatacaaccataaaatgataattacacccataaattgataattatcacacccataaattgatattgcctctgatcatagtcgaactagttaactagtacgctcagaccgcaccgacac

SEQ ID NO: 1506 - DNA, 127 bp, synthetic construct
  source 1..127: mol_type = other DNA
acatttgttgataaaaccataaaatgataattaaacccataaattgataattatcaaacccataaattgatattgcctctgatcatagtcagaccaacattgctacgacccgtattcgcaccgacac

SEQ ID NO: 1507 - DNA, 127 bp, synthetic construct
  source 1..127: mol_type = other DNA
acatttgttgataccaccataaaatgataattacccccataaattgataattatcacccccataaattgatattgcctctgatcatagtcagaccaacattgctacgacccgtattcgcaccgacac

SEQ ID NO: 1508 - DNA, 127 bp, synthetic construct
  source 1..127: mol_type = other DNA
acatttgttgatacacccataaaatgataattacaaccataaattgataattatcacaaccataaattgatattgcctctgatcatagtcagaccaacattgctacgacccgtattcgcaccgacac

SEQ ID NO: 1509 - DNA, 127 bp, synthetic construct
  source 1..127: mol_type = other DNA
acatttgttgatacaaacataaaatgataattacacacataaattgataattatcacacacataaattgatattgcctctgatcatagtcagaccaacattgctacgacccgtattcgcaccgacac

SEQ ID NO: 1510 - DNA, 127 bp, synthetic construct
  source 1..127: mol_type = other DNA
acatttgttgatacaacaataaaatgataattacaccaataaattgataattatcacaccaataaattgatattgcctctgatcatagtcagaccaacattgctacgacccgtattcgcaccgacac

SEQ ID NO: 1511 - DNA, 127 bp, synthetic construct
  source 1..127: mol_type = other DNA
acatttgttgatacaaccctaaaatgataattacacccctaaattgataattatcacacccctaaattgatattgcctctgatcatagtcagaccaacattgctacgacccgtattcgcaccgacac

SEQ ID NO: 1512 - DNA, 127 bp, synthetic construct
  source 1..127: mol_type = other DNA
acatttgttgatacaaccagaaaatgataattacacccagaaattgataattatcacacccagaaattgatattgcctctgatcatagtcagaccaacattgctacgacccgtattcgcaccgacac

SEQ ID NO: 1513 - DNA, 127 bp, synthetic construct
  source 1..127: mol_type = other DNA
acatttgttgatacaaccatcaaatgataattacacccatcaattgataattatcacacccatcaattgatattgcctctgatcatagtcagaccaacattgctacgacccgtattcgcaccgacac

SEQ ID NO: 1514 - DNA, 127 bp, synthetic construct
  source 1..127: mol_type = other DNA
acatttgttgatacaaccatacaatgataattacacccatacattgataattatcacacccatacattgatattgcctctgatcatagtcagaccaacattgctacgacccgtattcgcaccgacac

SEQ ID NO: 1515 - DNA, 127 bp, synthetic construct
  source 1..127: mol_type = other DNA
acatttgttgatacaaccataacatgataattacacccataacttgataattatcacacccataacttgatattgcctctgatcatagtcagaccaacattgctacgacccgtattcgcaccgacac

SEQ ID NO: 1516 - DNA, 127 bp, synthetic construct
  source 1..127: mol_type = other DNA
acatttgttgatacaaccataaactgataattacacccataaagtgataattatcacacccataaagtgatattgcctctgatcatagtcagaccaacattgctacgacccgtattcgcaccgacac

SEQ ID NO: 1517 - DNA, 127 bp, synthetic construct
  source 1..127: mol_type = other DNA
acatttgttgatacaaccataaaaggataattacacccataaatggataattatcacacccataaatggatattgcctctgatcatagtcagaccaacattgctacgacccgtattcgcaccgacac

SEQ ID NO: 1518 - DNA, 127 bp, synthetic construct
  source 1..127: mol_type = other DNA
acatttgttgatacaaccataaaattataattacacccataaatttataattatcacacccataaatttatattgcctctgatcatagtcagaccaacattgctacgacccgtattcgcaccgacac

SEQ ID NO: 1519 - DNA, 127 bp, synthetic construct
  source 1..127: mol_type = other DNA
acatttgttgatacaaccataaaatgctaattacacccataaattgctaattatcacacccataaattgctattgcctctgatcatagtcagaccaacattgctacgacccgtattcgcaccgacac

SEQ ID NO: 1520 - DNA, 127 bp, synthetic construct
  source 1..127: mol_type = other DNA
acatttgttgatacaaccataaaatgagaattacacccataaattgagaattatcacacccataaattgagattgcctctgatcatagtcagaccaacattgctacgacccgtattcgcaccgacac

SEQ ID NO: 1521 - DNA, 127 bp, synthetic construct
  source 1..127: mol_type = other DNA
acatttgttgatacaaccataaaatgatcattacacccataaattgatcattatcacacccataaattgatcttgcctctgatcatagtcagaccaacattgctacgacccgtattcgcaccgacac

SEQ ID NO: 1522 - DNA, 127 bp, synthetic construct
  source 1..127: mol_type = other DNA
acatttgttgatacaaccataaaatgatacttacacccataaattgatacttatcacacccataaattgatagtgcctctgatcatagtcagaccaacattgctacgacccgtattcgcaccgacac

SEQ ID NO: 1523 - DNA, 127 bp, synthetic construct
  source 1..127: mol_type = other DNA
acatttgttgatacaaccataaaatgataagtacacccataaattgataagtatcacacccataaattgatatggcctctgatcatagtcagaccaacattgctacgacccgtattcgcaccgacac

SEQ ID NO: 1524 - DNA, 127 bp, synthetic construct
  source 1..127: mol_type = other DNA
acatttgttgatacaaccataaaatgataatgacacccataaattgataatgatcacacccataaattgatatttcctctgatcatagtcagaccaacattgctacgacccgtattcgcaccgacac

SEQ ID NO: 1525 - DNA, 127 bp, synthetic construct
  source 1..127: mol_type = other DNA
acatttgttgatacaaccataaaatgataattccacccataaattgataattctcacacccataaattgatattgactctgatcatagtcagaccaacattgctacgacccgtattcgcaccgacac

SEQ ID NO: 1526 - DNA, 127 bp, synthetic construct
  source 1..127: mol_type = other DNA
acatttgttgatacaaccataaaatgataatgccacccataaattgataatgctcacacccataaattgatatttactctgatcatagtcagaccaacattgctacgacccgtattcgcaccgacac

SEQ ID NO: 1527 - DNA, 127 bp, synthetic construct
  source 1..127: mol_type = other DNA
acatttgttgatacaaccataaaatgataaggccacccataaattgataaggctcacacccataaattgatatgtactctgatcatagtcagaccaacattgctacgacccgtattcgcaccgacac

SEQ ID NO: 1528 - DNA, 127 bp, synthetic construct
  source 1..127: mol_type = other DNA
acatttgttgatacaaccataaaatgatacggccacccataaattgatacggctcacacccataaattgataggtactctgatcatagtcagaccaacattgctacgacccgtattcgcaccgacac

SEQ ID NO: 1529 - DNA, 127 bp, synthetic construct
  source 1..127: mol_type = other DNA
acatttgttgatacaaccataaaatgatccggccacccataaattgatccggctcacacccataaattgatcggtactctgatcatagtcagaccaacattgctacgacccgtattcgcaccgacac

SEQ ID NO: 1530 - DNA, 127 bp, synthetic construct
  source 1..127: mol_type = other DNA
acatttgttgatacaaccataaaatgagccggccacccataaattgagccggctcacacccataaattgagcggtactctgatcatagtcagaccaacattgctacgacccgtattcgcaccgacac

SEQ ID NO: 1531 - DNA, 127 bp, synthetic construct
  source 1..127: mol_type = other DNA
acatttgttgatacaaccataaaatgcgccggccacccataaattgcgccggctcacacccataaattgcgcggtactctgatcatagtcagaccaacattgctacgacccgtattcgcaccgacac

SEQ ID NO: 1532 - DNA, 127 bp, synthetic construct
  source 1..127: mol_type = other DNA
acatttgttgatacaaccataccatgataattacacccataccttgataattatcacacccataccttgatattgcctctgatcatagtcagaccaacattgctacgacccgtattcgcaccgacac

SEQ ID NO: 1533 - DNA, 127 bp, synthetic construct
  source 1..127: mol_type = other DNA
acatttgttgatacaaccataacctgataattacacccataacgtgataattatcacacccataacgtgatattgcctctgatcatagtcagaccaacattgctacgacccgtattcgcaccgacac

SEQ ID NO: 1534 - DNA, 127 bp, synthetic construct
  source 1..127: mol_type = other DNA
acatttgttgatacaaccataccctgataattacacccataccgtgataattatcacacccataccgtgatattgcctctgatcatagtcagaccaacattgctacgacccgtattcgcaccgacac

SEQ ID NO: 1535 - DNA, 127 bp, synthetic construct
  source 1..127: mol_type = other DNA
acatttgttgatacaaccatcccctgataattacacccatcccgtgataattatcacacccatcccgtgatattgcctctgatcatagtcagaccaacattgctacgacccgtattcgcaccgacac

SEQ ID NO: 1536 - DNA, 127 bp, synthetic construct
  source 1..127: mol_type = other DNA
acatttgttgatacaaccatacccggataattacacccataccgggataattatcacacccataccgggatattgcctctgatcatagtcagaccaacattgctacgacccgtattcgcaccgacac

SEQ ID NO: 1537 - DNA, 127 bp, synthetic construct
  source 1..127: mol_type = other DNA
acatttgttgatacaaccagcccctgataattacacccagcccgtgataattatcacacccagcccgtgatattgcctctgatcatagtcagaccaacattgctacgacccgtattcgcaccgacac

SEQ ID NO: 1538 - DNA, 127 bp, synthetic construct
  source 1..127: mol_type = other DNA
acatttgttgatacaaccatacccgtataattacacccataccggtataattatcacacccataccggtatattgcctctgatcatagtcagaccaacattgctacgacccgtattcgcaccgacac

SEQ ID NO: 1539 - DNA, 127 bp, synthetic construct
  source 1..127: mol_type = other DNA
acatttgttgatagaaccataaaatgataattagacccataaattgataattatcagacccataaattgatattgcctctgatcatagtcagaccaacattgctacgacccgtattcgcaccgacac

SEQ ID NO: 1540 - DNA, 127 bp, synthetic construct
  source 1..127: mol_type = other DNA
acatttgttgatactaccataaaatgataattactcccataaattgataattatcactcccataaattgatattgcctctgatcatagtcagaccaacattgctacgacccgtattcgcaccgacac

SEQ ID NO: 1541 - DNA, 127 bp, synthetic construct
  source 1..127: mol_type = other DNA
acatttgttgatacatccataaaatgataattacagccataaattgataattatcacagccataaattgatattgcctctgatcatagtcagaccaacattgctacgacccgtattcgcaccgacac

SEQ ID NO: 1542 - DNA, 127 bp, synthetic construct
  source 1..127: mol_type = other DNA
acatttgttgatacaagcataaaatgataattacacgcataaattgataattatcacacgcataaattgatattgcctctgatcatagtcagaccaacattgctacgacccgtattcgcaccgacac

SEQ ID NO: 1543 - DNA, 127 bp, synthetic construct
  source 1..127: mol_type = other DNA
acatttgttgatacaacgataaaatgataattacaccgataaattgataattatcacaccgataaattgatattgcctctgatcatagtcagaccaacattgctacgacccgtattcgcaccgacac

SEQ ID NO: 1544 - DNA, 127 bp, synthetic construct
  source 1..127: mol_type = other DNA
acatttgttgatacaaccttaaaatgataattacacccttaaattgataattatcacacccttaaattgatattgcctctgatcatagtcagaccaacattgctacgacccgtattcgcaccgacac

SEQ ID NO: 1545 - DNA, 127 bp, synthetic construct
  source 1..127: mol_type = other DNA
acatttgttgatacaaccaaaaaatgataattacacccaaaaattgataattatcacacccaaaaattgatattgcctctgatcatagtcagaccaacattgctacgacccgtattcgcaccgacac

SEQ ID NO: 1546 - DNA, 127 bp, synthetic construct
  source 1..127: mol_type = other DNA
acatttgttgatacaaccattaaatgataattacacccattaattgataattatcacacccattaattgatattgcctctgatcatagtcagaccaacattgctacgacccgtattcgcaccgacac

SEQ ID NO: 1547 - DNA, 127 bp, synthetic construct
  source 1..127: mol_type = other DNA
acatttgttgatacaaccatataatgataattacacccatatattgataattatcacacccatatattgatattgcctctgatcatagtcagaccaacattgctacgacccgtattcgcaccgacac

SEQ ID NO: 1548 - DNA, 127 bp, synthetic construct
  source 1..127: mol_type = other DNA
acatttgttgatacaaccataatatgataattacacccataatttgataattatcacacccataatttgatattgcctctgatcatagtcagaccaacattgctacgacccgtattcgcaccgacac

SEQ ID NO: 1549 - DNA, 127 bp, synthetic construct
  source 1..127: mol_type = other DNA
acatttgttgatacaaccataaattgataattacacccataaaatgataattatcacacccataaaatgatattgcctctgatcatagtcagaccaacattgctacgacccgtattcgcaccgacac

SEQ ID NO: 1550 - DNA, 127 bp, synthetic construct
  source 1..127: mol_type = other DNA
acatttgttgatacaaccataaaaagataattacacccataaatagataattatcacacccataaatagatattgcctctgatcatagtcagaccaacattgctacgacccgtattcgcaccgacac

SEQ ID NO: 1551 - DNA, 127 bp, synthetic construct
  source 1..127: mol_type = other DNA
acatttgttgatacaaccataaaatcataattacacccataaattcataattatcacacccataaattcatattgcctctgatcatagtcagaccaacattgctacgacccgtattcgcaccgacac

SEQ ID NO: 1552 - DNA, 127 bp, synthetic construct
  source 1..127: mol_type = other DNA
acatttgttgatacaaccataaaatgttaattacacccataaattgttaattatcacacccataaattgttattgcctctgatcatagtcagaccaacattgctacgacccgtattcgcaccgacac

SEQ ID NO: 1553 - DNA, 127 bp, synthetic construct
  source 1..127: mol_type = other DNA
acatttgttgatacaaccataaaatgaaaattacacccataaattgaaaattatcacacccataaattgaaattgcctctgatcatagtcagaccaacattgctacgacccgtattcgcaccgacac

SEQ ID NO: 1554 - DNA, 127 bp, synthetic construct
  source 1..127: mol_type = other DNA
acatttgttgatacaaccataaaatgattattacacccataaattgattattatcacacccataaattgattttgcctctgatcatagtcagaccaacattgctacgacccgtattcgcaccgacac

SEQ ID NO: 1555 - DNA, 127 bp, synthetic construct
  source 1..127: mol_type = other DNA
acatttgttgatacaaccataaaatgatatttacacccataaattgatatttatcacacccataaattgataatgcctctgatcatagtcagaccaacattgctacgacccgtattcgcaccgacac

SEQ ID NO: 1556 - DNA, 127 bp, synthetic construct
  source 1..127: mol_type = other DNA
acatttgttgatacaaccataaaatgataaatacacccataaattgataaatatcacacccataaattgatatagcctctgatcatagtcagaccaacattgctacgacccgtattcgcaccgacac

SEQ ID NO: 1557 - DNA, 127 bp, synthetic construct
  source 1..127: mol_type = other DNA
acatttgttgatacaaccataaaatgataataacacccataaattgataataatcacacccataaattgatattccctctgatcatagtcagaccaacattgctacgacccgtattcgcaccgacac

SEQ ID NO: 1558 - DNA, 127 bp, synthetic construct
  source 1..127: mol_type = other DNA
acatttgttgatacaaccataaaatgataatttcacccataaattgataattttcacacccataaattgatattggctctgatcatagtcagaccaacattgctacgacccgtattcgcaccgacac

SEQ ID NO: 1559 - DNA, 127 bp, synthetic construct
  source 1..127: mol_type = other DNA
acatttgttgatacaaccataaaatgataatatcacccataaattgataatattcacacccataaattgatattcgctctgatcatagtcagaccaacattgctacgacccgtattcgcaccgacac

SEQ ID NO: 1560 - DNA, 127 bp, synthetic construct
  source 1..127: mol_type = other DNA
acatttgttgatacaaccataaaatgataaaatcacccataaattgataaaattcacacccataaattgatatacgctctgatcatagtcagaccaacattgctacgacccgtattcgcaccgacac

SEQ ID NO: 1561 - DNA, 127 bp, synthetic construct
  source 1..127: mol_type = other DNA
acatttgttgatacaaccataaaatgatataatcacccataaattgatataattcacacccataaattgataaacgctctgatcatagtcagaccaacattgctacgacccgtattcgcaccgacac

SEQ ID NO: 1562 - DNA, 127 bp, synthetic construct
  source 1..127: mol_type = other DNA
acatttgttgatacaaccataaaatgatttaatcacccataaattgatttaattcacacccataaattgattaacgctctgatcatagtcagaccaacattgctacgacccgtattcgcaccgacac

SEQ ID NO: 1563 - DNA, 127 bp, synthetic construct
  source 1..127: mol_type = other DNA
acatttgttgatacaaccataaaatgaattaatcacccataaattgaattaattcacacccataaattgaataacgctctgatcatagtcagaccaacattgctacgacccgtattcgcaccgacac

SEQ ID NO: 1564 - DNA, 127 bp, synthetic construct
  source 1..127: mol_type = other DNA
acatttgttgatacaaccataaaatgtattaatcacccataaattgtattaattcacacccataaattgtataacgctctgatcatagtcagaccaacattgctacgacccgtattcgcaccgacac

SEQ ID NO: 1565 - DNA, 127 bp, synthetic construct
  source 1..127: mol_type = other DNA
acatttgttgatacaaccatattatgataattacacccatattttgataattatcacacccatattttgatattgcctctgatcatagtcagaccaacattgctacgacccgtattcgcaccgacac

SEQ ID NO: 1566 - DNA, 127 bp, synthetic construct
  source 1..127: mol_type = other DNA
acatttgttgatacaaccataatttgataattacacccataatatgataattatcacacccataatatgatattgcctctgatcatagtcagaccaacattgctacgacccgtattcgcaccgacac

SEQ ID NO: 1567 - DNA, 127 bp, synthetic construct
  source 1..127: mol_type = other DNA
acatttgttgatacaaccatattttgataattacacccatattatgataattatcacacccatattatgatattgcctctgatcatagtcagaccaacattgctacgacccgtattcgcaccgacac

SEQ ID NO: 1568 - DNA, 127 bp, synthetic construct
  source 1..127: mol_type = other DNA
acatttgttgatacaaccattttttgataattacacccattttatgataattatcacacccattttatgatattgcctctgatcatagtcagaccaacattgctacgacccgtattcgcaccgacac

SEQ ID NO: 1569 - DNA, 127 bp, synthetic construct
  source 1..127: mol_type = other DNA
acatttgttgatacaaccatatttagataattacacccatattaagataattatcacacccatattaagatattgcctctgatcatagtcagaccaacattgctacgacccgtattcgcaccgacac

SEQ ID NO: 1570 - DNA, 127 bp, synthetic construct
  source 1..127: mol_type = other DNA
acatttgttgatacaaccaatttttgataattacacccaatttatgataattatcacacccaatttatgatattgcctctgatcatagtcagaccaacattgctacgacccgtattcgcaccgacac

SEQ ID NO: 1571 - DNA, 127 bp, synthetic construct
  source 1..127: mol_type = other DNA
acatttgttgatacaaccatatttacataattacacccatattaacataattatcacacccatattaacatattgcctctgatcatagtcagaccaacattgctacgacccgtattcgcaccgacac

SEQ ID NO: 1572 - DNA, 127 bp, synthetic construct
  source 1..127: mol_type = other DNA
acatttgtcaaccataaaatgataattacacccataaattgataattatcacacccataaattgatattgcctctgatcatagtcagaccaacattgctacgacccgtattcgcaccgacactgact

SEQ ID NO: 1573 - DNA, 127 bp, synthetic construct
  source 1..127: mol_type = other DNA
acatttgttcaaccataaaatgataattacacccataaattgataattatcacacccataaattgatattgcctctgatcatagtcagaccaacattgctacgacccgtattcgcaccgacactgac

SEQ ID NO: 1574 - DNA, 127 bp, synthetic construct
  source 1..127: mol_type = other DNA
acatttgttgcaaccataaaatgataattacacccataaattgataattatcacacccataaattgatattgcctctgatcatagtcagaccaacattgctacgacccgtattcgcaccgacactga

SEQ ID NO: 1575 - DNA, 127 bp, synthetic construct
  source 1..127: mol_type = other DNA
acatttgttgacaaccataaaatgataattacacccataaattgataattatcacacccataaattgatattgcctctgatcatagtcagaccaacattgctacgacccgtattcgcaccgacactg

SEQ ID NO: 1576 - DNA, 127 bp, synthetic construct
  source 1..127: mol_type = other DNA
acatttgttgatcaaccataaaatgataattacacccataaattgataattatcacacccataaattgatattgcctctgatcatagtcagaccaacattgctacgacccgtattcgcaccgacact

SEQ ID NO: 1577 - DNA, 127 bp, synthetic construct
  source 1..127: mol_type = other DNA
acatttgttgatatcaaccataaaatgataattacacccataaattgataattatcacacccataaattgatattgcctctgatcatagtcagaccaacattgctacgacccgtattcgcaccgaca

SEQ ID NO: 1578 - DNA, 127 bp, synthetic construct
  source 1..127: mol_type = other DNA
acatttgttgatatgcaaccataaaatgataattacacccataaattgataattatcacacccataaattgatattgcctctgatcatagtcagaccaacattgctacgacccgtattcgcaccgac

SEQ ID NO: 1579 - DNA, 127 bp, synthetic construct
  source 1..127: mol_type = other DNA
acatttgttgatatgtcaaccataaaatgataattacacccataaattgataattatcacacccataaattgatattgcctctgatcatagtcagaccaacattgctacgacccgtattcgcaccga

SEQ ID NO: 1580 - DNA, 127 bp, synthetic construct
  source 1..127: mol_type = other DNA
acatttgttgatatgttcaaccataaaatgataattacacccataaattgataattatcacacccataaattgatattgcctctgatcatagtcagaccaacattgctacgacccgtattcgcaccg

SEQ ID NO: 1581 - DNA, 127 bp, synthetic construct
  source 1..127: mol_type = other DNA
acatttgttgatatgttgcaaccataaaatgataattacacccataaattgataattatcacacccataaattgatattgcctctgatcatagtcagaccaacattgctacgacccgtattcgcacc

SEQ ID NO: 1582 - DNA, 127 bp, synthetic construct
  source 1..127: mol_type = other DNA
acatttgttgatatgttgacaaccataaaatgataattacacccataaattgataattatcacacccataaattgatattgcctctgatcatagtcagaccaacattgctacgacccgtattcgcac

SEQ ID NO: 1583 - DNA, 127 bp, synthetic construct
  source 1..127: mol_type = other DNA
acatttgttgatatgttgatcaaccataaaatgataattacacccataaattgataattatcacacccataaattgatattgcctctgatcatagtcagaccaacattgctacgacccgtattcgca

SEQ ID NO: 1584 - DNA, 127 bp, synthetic construct
  source 1..127: mol_type = other DNA
acatttgttgatatgttgatacaaccataaaatgataattacacccataaattgataattatcacacccataaattgatattgcctctgatcatagtcagaccaacattgctacgacccgtattcgc

SEQ ID NO: 1585 - DNA, 127 bp, synthetic construct
  source 1..127: mol_type = other DNA
acatttgttgatacaaccataaaatgataattaacacccataaattgataattatcacacccataaattgatattgcctctgatcatagtcagaccaacattgctacgacccgtattcgcaccgaca

SEQ ID NO: 1586 - DNA, 127 bp, synthetic construct
  source 1..127: mol_type = other DNA
acatttgttgatacaaccataaaatgataattaatcacccataaattgataattatcacacccataaattgatattgcctctgatcatagtcagaccaacattgctacgacccgtattcgcaccgac

SEQ ID NO: 1587 - DNA, 127 bp, synthetic construct
  source 1..127: mol_type = other DNA
acatttgttgatacaaccataaaatgataattaatacacccataaattgataattatcacacccataaattgatattgcctctgatcatagtcagaccaacattgctacgacccgtattcgcaccga

SEQ ID NO: 1588 - DNA, 127 bp, synthetic construct
  source 1..127: mol_type = other DNA
acatttgttgatacaaccataaaatgataattaataacacccataaattgataattatcacacccataaattgatattgcctctgatcatagtcagaccaacattgctacgacccgtattcgcaccg

SEQ ID NO: 1589 - DNA, 127 bp, synthetic construct
  source 1..127: mol_type = other DNA
acatttgttgatacaaccataaaatgataattaataatcacccataaattgataattatcacacccataaattgatattgcctctgatcatagtcagaccaacattgctacgacccgtattcgcacc

SEQ ID NO: 1590 - DNA, 127 bp, synthetic construct
  source 1..127: mol_type = other DNA
acatttgttgatacaaccataaaatgataattaataattcacccataaattgataattatcacacccataaattgatattgcctctgatcatagtcagaccaacattgctacgacccgtattcgcac

SEQ ID NO: 1591 - DNA, 127 bp, synthetic construct
  source 1..127: mol_type = other DNA
acatttgttgatacaaccataaaatgataattaataattacacccataaattgataattatcacacccataaattgatattgcctctgatcatagtcagaccaacattgctacgacccgtattcgca

SEQ ID NO: 1592 - DNA, 127 bp, synthetic construct
  source 1..127: mol_type = other DNA
acatttgttgatacaaccataaaatgataattaataattatcacccataaattgataattatcacacccataaattgatattgcctctgatcatagtcagaccaacattgctacgacccgtattcgc

SEQ ID NO: 1593 - DNA, 127 bp, synthetic construct
  source 1..127: mol_type = other DNA
acatttgttgatacaaccataaaatgataattaataattattcacccataaattgataattatcacacccataaattgatattgcctctgatcatagtcagaccaacattgctacgacccgtattcg

SEQ ID NO: 1594 - DNA, 127 bp, synthetic construct
  source 1..127: mol_type = other DNA
acatttgttgatacaaccataaaatgataattaataattatttcacccataaattgataattatcacacccataaattgatattgcctctgatcatagtcagaccaacattgctacgacccgtattc

SEQ ID NO: 1595 - DNA, 127 bp, synthetic construct
  source 1..127: mol_type = other DNA
acatttgttgatacaaccataaaatgataattaataattatttacacccataaattgataattatcacacccataaattgatattgcctctgatcatagtcagaccaacattgctacgacccgtatt

SEQ ID NO: 1596 - DNA, 127 bp, synthetic construct
  source 1..127: mol_type = other DNA
acatttgttgatacaaccataaaatgataattaataattatttatcacccataaattgataattatcacacccataaattgatattgcctctgatcatagtcagaccaacattgctacgacccgtat

SEQ ID NO: 1597 - DNA, 127 bp, synthetic construct
  source 1..127: mol_type = other DNA
acatttgttgatacaaccataaaatgataattaataattatttatacacccataaattgataattatcacacccataaattgatattgcctctgatcatagtcagaccaacattgctacgacccgta

SEQ ID NO: 1598 - DNA, 127 bp, synthetic construct
  source 1..127: mol_type = other DNA
acatttgttgatacaaccataaaatgataattaataattatttataacacccataaattgataattatcacacccataaattgatattgcctctgatcatagtcagaccaacattgctacgacccgt

SEQ ID NO: 1599 - DNA, 127 bp, synthetic construct
  source 1..127: mol_type = other DNA
acatttgttgatacaaccataaaatgataattaataattatttataatcacccataaattgataattatcacacccataaattgatattgcctctgatcatagtcagaccaacattgctacgacccg

SEQ ID NO: 1600 - DNA, 127 bp, synthetic construct
  source 1..127: mol_type = other DNA
acatttgttgatacaaccataaaatgataattaataattatttataatccacccataaattgataattatcacacccataaattgatattgcctctgatcatagtcagaccaacattgctacgaccc

SEQ ID NO: 1601 - DNA, 127 bp, synthetic construct
  source 1..127: mol_type = other DNA
acatttgttgatacaaccataaaatgataattaataattatttataatcacacccataaattgataattatcacacccataaattgatattgcctctgatcatagtcagaccaacattgctacgacc

SEQ ID NO: 1602 - DNA, 127 bp, synthetic construct
  source 1..127: mol_type = other DNA
acatttgttgatacaaccataaaatgataattaataattatttataatcagcacccataaattgataattatcacacccataaattgatattgcctctgatcatagtcagaccaacattgctacgac

SEQ ID NO: 1603 - DNA, 127 bp, synthetic construct
  source 1..127: mol_type = other DNA
acatttgttgatacaaccataaaatgataattaataattatttataatcagccacccataaattgataattatcacacccataaattgatattgcctctgatcatagtcagaccaacattgctacga

SEQ ID NO: 1604 - DNA, 127 bp, synthetic construct
  source 1..127: mol_type = other DNA
acatttgttgatacaaccataaaatgataattaataattatttataatcagcacacccataaattgataattatcacacccataaattgatattgcctctgatcatagtcagaccaacattgctacg

SEQ ID NO: 1605 - DNA, 127 bp, synthetic construct
  source 1..127: mol_type = other DNA
acatttgttgatacaaccataaaatgataattaataattatttataatcagcaacacccataaattgataattatcacacccataaattgatattgcctctgatcatagtcagaccaacattgctac

SEQ ID NO: 1606 - DNA, 127 bp, synthetic construct
  source 1..127: mol_type = other DNA
acatttgttgatacaaccataaaatgataattaataattatttataatcagcaaccacccataaattgataattatcacacccataaattgatattgcctctgatcatagtcagaccaacattgcta

SEQ ID NO: 1607 - DNA, 127 bp, synthetic construct
  source 1..127: mol_type = other DNA
acatttgttgatacaaccataaaatgataattaataattatttataatcagcaactcacccataaattgataattatcacacccataaattgatattgcctctgatcatagtcagaccaacattgct

SEQ ID NO: 1608 - DNA, 127 bp, synthetic construct
  source 1..127: mol_type = other DNA
acatttgttgatacaaccataaaatgataattaataattatttataatcagcaacttcacccataaattgataattatcacacccataaattgatattgcctctgatcatagtcagaccaacattgc

SEQ ID NO: 1609 - DNA, 127 bp, synthetic construct
  source 1..127: mol_type = other DNA
acatttgttgatacaaccataaaatgataattaataattatttataatcagcaacttacacccataaattgataattatcacacccataaattgatattgcctctgatcatagtcagaccaacattg

SEQ ID NO: 1610 - DNA, 127 bp, synthetic construct
  source 1..127: mol_type = other DNA
acatttgttgatacaaccataaaatgataattaataattatttataatcagcaacttaacacccataaattgataattatcacacccataaattgatattgcctctgatcatagtcagaccaacatt

SEQ ID NO: 1611 - DNA, 127 bp, synthetic construct
  source 1..127: mol_type = other DNA
acatttgttgatacaaccataaaatgataattaataattatttataatcagcaacttaaccacccataaattgataattatcacacccataaattgatattgcctctgatcatagtcagaccaacat

SEQ ID NO: 1612 - DNA, 127 bp, synthetic construct
  source 1..127: mol_type = other DNA
acatttgttgatacaaccataaaatgataattaataattatttataatcagcaacttaacccacccataaattgataattatcacacccataaattgatattgcctctgatcatagtcagaccaaca

SEQ ID NO: 1613 - DNA, 127 bp, synthetic construct
  source 1..127: mol_type = other DNA
acatttgttgatacaaccataaaatgataattaataattatttataatcagcaacttaaccacacccataaattgataattatcacacccataaattgatattgcctctgatcatagtcagaccaac

SEQ ID NO: 1614 - DNA, 127 bp, synthetic construct
  source 1..127: mol_type = other DNA
acatttgttgatacaaccataaaatgataattaataattatttataatcagcaacttaaccaccacccataaattgataattatcacacccataaattgatattgcctctgatcatagtcagaccaa

SEQ ID NO: 1615 - DNA, 127 bp, synthetic construct
  source 1..127: mol_type = other DNA
acatttgttgatacaaccataaaatgataattaataattatttataatcagcaacttaaccacacacccataaattgataattatcacacccataaattgatattgcctctgatcatagtcagacca

SEQ ID NO: 1616 - DNA, 127 bp, synthetic construct
  source 1..127: mol_type = other DNA
acatttgttgatacaaccataaaatgataattaataattatttataatcagcaacttaaccacaacacccataaattgataattatcacacccataaattgatattgcctctgatcatagtcagacc

SEQ ID NO: 1617 - DNA, 127 bp, synthetic construct
  source 1..127: mol_type = other DNA
acatttgttgatacaaccataaaatgataattaataattatttataatcagcaacttaaccacaaacacccataaattgataattatcacacccataaattgatattgcctctgatcatagtcagac

SEQ ID NO: 1618 - DNA, 127 bp, synthetic construct
  source 1..127: mol_type = other DNA
acatttgttgatacaaccataaaatgataattaataattatttataatcagcaacttaaccacaaaacacccataaattgataattatcacacccataaattgatattgcctctgatcatagtcaga

SEQ ID NO: 1619 - DNA, 127 bp, synthetic construct
  source 1..127: mol_type = other DNA
acatttgttgatacaaccataaaatgataattacacccataaattgataattatcaacaaacgcccggtcgcggtactctgatcatagtcagaccaacattgctacgacccgtattcgcaccgacac

SEQ ID NO: 1620 - DNA, 127 bp, synthetic construct
  source 1..127: mol_type = other DNA
acatttgttgatacaaccataaaatgataattaacacccataaattgataattatcaacaaacgcccggtcgcggtactctgatcatagtcagaccaacattgctacgacccgtattcgcaccgaca

SEQ ID NO: 1621 - DNA, 127 bp, synthetic construct
  source 1..127: mol_type = other DNA
acatttgttgatacaaccataaaatgataattaatcacccataaattgataattatcaacaaacgcccggtcgcggtactctgatcatagtcagaccaacattgctacgacccgtattcgcaccgac

SEQ ID NO: 1622 - DNA, 127 bp, synthetic construct
  source 1..127: mol_type = other DNA
acatttgttgatacaaccataaaatgataattaatacacccataaattgataattatcaacaaacgcccggtcgcggtactctgatcatagtcagaccaacattgctacgacccgtattcgcaccga

SEQ ID NO: 1623 - DNA, 127 bp, synthetic construct
  source 1..127: mol_type = other DNA
acatttgttgatacaaccataaaatgataattaataacacccataaattgataattatcaacaaacgcccggtcgcggtactctgatcatagtcagaccaacattgctacgacccgtattcgcaccg

SEQ ID NO: 1624 - DNA, 127 bp, synthetic construct
  source 1..127: mol_type = other DNA
acatttgttgatacaaccataaaatgataattaataatcacccataaattgataattatcaacaaacgcccggtcgcggtactctgatcatagtcagaccaacattgctacgacccgtattcgcacc

SEQ ID NO: 1625 - DNA, 127 bp, synthetic construct
  source 1..127: mol_type = other DNA
acatttgttgatacaaccataaaatgataattaataattcacccataaattgataattatcaacaaacgcccggtcgcggtactctgatcatagtcagaccaacattgctacgacccgtattcgcac

SEQ ID NO: 1626 - DNA, 127 bp, synthetic construct
  source 1..127: mol_type = other DNA
acatttgttgatacaaccataaaatgataattaataattacacccataaattgataattatcaacaaacgcccggtcgcggtactctgatcatagtcagaccaacattgctacgacccgtattcgca

SEQ ID NO: 1627 - DNA, 127 bp, synthetic construct
  source 1..127: mol_type = other DNA
acatttgttgatacaaccataaaatgataattaataattatcacccataaattgataattatcaacaaacgcccggtcgcggtactctgatcatagtcagaccaacattgctacgacccgtattcgc

SEQ ID NO: 1628 - DNA, 127 bp, synthetic construct
  source 1..127: mol_type = other DNA
acatttgttgatacaaccataaaatgataattaataattattcacccataaattgataattatcaacaaacgcccggtcgcggtactctgatcatagtcagaccaacattgctacgacccgtattcg

SEQ ID NO: 1629 - DNA, 127 bp, synthetic construct
  source 1..127: mol_type = other DNA
acatttgttgatacaaccataaaatgataattaataattatttcacccataaattgataattatcaacaaacgcccggtcgcggtactctgatcatagtcagaccaacattgctacgacccgtattc

SEQ ID NO: 1630 - DNA, 127 bp, synthetic construct
  source 1..127: mol_type = other DNA
acatttgttgatacaaccataaaatgataattaataattatttacacccataaattgataattatcaacaaacgcccggtcgcggtactctgatcatagtcagaccaacattgctacgacccgtatt

SEQ ID NO: 1631 - DNA, 127 bp, synthetic construct
  source 1..127: mol_type = other DNA
acatttgttgatacaaccataaaatgataattaataattatttatcacccataaattgataattatcaacaaacgcccggtcgcggtactctgatcatagtcagaccaacattgctacgacccgtat

SEQ ID NO: 1632 - DNA, 127 bp, synthetic construct
  source 1..127: mol_type = other DNA
acatttgttgatacaaccataaaatgataattaataattatttatacacccataaattgataattatcaacaaacgcccggtcgcggtactctgatcatagtcagaccaacattgctacgacccgta

SEQ ID NO: 1633 - DNA, 127 bp, synthetic construct
  source 1..127: mol_type = other DNA
acatttgttgatacaaccataaaatgataattaataattatttataacacccataaattgataattatcaacaaacgcccggtcgcggtactctgatcatagtcagaccaacattgctacgacccgt

SEQ ID NO: 1634 - DNA, 127 bp, synthetic construct
  source 1..127: mol_type = other DNA
acatttgttgatacaaccataaaatgataattaataattatttataatcacccataaattgataattatcaacaaacgcccggtcgcggtactctgatcatagtcagaccaacattgctacgacccg

SEQ ID NO: 1635 - DNA, 127 bp, synthetic construct
  source 1..127: mol_type = other DNA
acatttgttgatacaaccataaaatgataattaataattatttataatccacccataaattgataattatcaacaaacgcccggtcgcggtactctgatcatagtcagaccaacattgctacgaccc

SEQ ID NO: 1636 - DNA, 127 bp, synthetic construct
  source 1..127: mol_type = other DNA
acatttgttgatacaaccataaaatgataattaataattatttataatcacacccataaattgataattatcaacaaacgcccggtcgcggtactctgatcatagtcagaccaacattgctacgacc

SEQ ID NO: 1637 - DNA, 127 bp, synthetic construct
  source 1..127: mol_type = other DNA
acatttgttgatacaaccataaaatgataattaataattatttataatcagcacccataaattgataattatcaacaaacgcccggtcgcggtactctgatcatagtcagaccaacattgctacgac

SEQ ID NO: 1638 - DNA, 127 bp, synthetic construct
  source 1..127: mol_type = other DNA
acatttgttgatacaaccataaaatgataattaataattatttataatcagccacccataaattgataattatcaacaaacgcccggtcgcggtactctgatcatagtcagaccaacattgctacga

SEQ ID NO: 1639 - DNA, 127 bp, synthetic construct
  source 1..127: mol_type = other DNA
acatttgttgatacaaccataaaatgataattaataattatttataatcagcacacccataaattgataattatcaacaaacgcccggtcgcggtactctgatcatagtcagaccaacattgctacg

SEQ ID NO: 1640 - DNA, 127 bp, synthetic construct
  source 1..127: mol_type = other DNA
acatttgttgatacaaccataaaatgataattaataattatttataatcagcaacacccataaattgataattatcaacaaacgcccggtcgcggtactctgatcatagtcagaccaacattgctac

SEQ ID NO: 1641 - DNA, 127 bp, synthetic construct
  source 1..127: mol_type = other DNA
acatttgttgatacaaccataaaatgataattaataattatttataatcagcaaccacccataaattgataattatcaacaaacgcccggtcgcggtactctgatcatagtcagaccaacattgcta

SEQ ID NO: 1642 - DNA, 127 bp, synthetic construct
  source 1..127: mol_type = other DNA
acatttgttgatacaaccataaaatgataattaataattatttataatcagcaactcacccataaattgataattatcaacaaacgcccggtcgcggtactctgatcatagtcagaccaacattgct

SEQ ID NO: 1643 - DNA, 127 bp, synthetic construct
  source 1..127: mol_type = other DNA
acatttgttgatacaaccataaaatgataattaataattatttataatcagcaacttcacccataaattgataattatcaacaaacgcccggtcgcggtactctgatcatagtcagaccaacattgc

SEQ ID NO: 1644 - DNA, 127 bp, synthetic construct
  source 1..127: mol_type = other DNA
acatttgttgatacaaccataaaatgataattaataattatttataatcagcaacttacacccataaattgataattatcaacaaacgcccggtcgcggtactctgatcatagtcagaccaacattg

SEQ ID NO: 1645 - DNA, 127 bp, synthetic construct
  source 1..127: mol_type = other DNA
acatttgttgatacaaccataaaatgataattaataattatttataatcagcaacttaacacccataaattgataattatcaacaaacgcccggtcgcggtactctgatcatagtcagaccaacatt

SEQ ID NO: 1646 - DNA, 127 bp, synthetic construct
  source 1..127: mol_type = other DNA
acatttgttgatacaaccataaaatgataattaataattatttataatcagcaacttaaccacccataaattgataattatcaacaaacgcccggtcgcggtactctgatcatagtcagaccaacat

SEQ ID NO: 1647 - DNA, 127 bp, synthetic construct
  source 1..127: mol_type = other DNA
acatttgttgatacaaccataaaatgataattaataattatttataatcagcaacttaacccacccataaattgataattatcaacaaacgcccggtcgcggtactctgatcatagtcagaccaaca

SEQ ID NO: 1648 - DNA, 127 bp, synthetic construct
  source 1..127: mol_type = other DNA
acatttgttgatacaaccataaaatgataattaataattatttataatcagcaacttaaccacacccataaattgataattatcaacaaacgcccggtcgcggtactctgatcatagtcagaccaac

SEQ ID NO: 1649 - DNA, 127 bp, synthetic construct
  source 1..127: mol_type = other DNA
acatttgttgatacaaccataaaatgataattaataattatttataatcagcaacttaaccaccacccataaattgataattatcaacaaacgcccggtcgcggtactctgatcatagtcagaccaa

SEQ ID NO: 1650 - DNA, 127 bp, synthetic construct
  source 1..127: mol_type = other DNA
acatttgttgatacaaccataaaatgataattaataattatttataatcagcaacttaaccacacacccataaattgataattatcaacaaacgcccggtcgcggtactctgatcatagtcagacca

SEQ ID NO: 1651 - DNA, 127 bp, synthetic construct
  source 1..127: mol_type = other DNA
acatttgttgatacaaccataaaatgataattaataattatttataatcagcaacttaaccacaacacccataaattgataattatcaacaaacgcccggtcgcggtactctgatcatagtcagacc

SEQ ID NO: 1652 - DNA, 127 bp, synthetic construct
  source 1..127: mol_type = other DNA
acatttgttgatacaaccataaaatgataattaataattatttataatcagcaacttaaccacaaacacccataaattgataattatcaacaaacgcccggtcgcggtactctgatcatagtcagac

SEQ ID NO: 1653 - DNA, 127 bp, synthetic construct
  source 1..127: mol_type = other DNA
acatttgttgatacaaccataaaatgataattaataattatttataatcagcaacttaaccacaaaacacccataaattgataattatcaacaaacgcccggtcgcggtactctgatcatagtcaga

SEQ ID NO: 1654 - DNA, 127 bp, synthetic construct
  source 1..127: mol_type = other DNA
acatttgttgatacaaccataaaatgataattacacccataaattgataattacacccataaattgatattgcctctgatcatagtcagaccaacattgctacgacccgtattcgcaccgacactga

SEQ ID NO: 1655 - DNA, 127 bp, synthetic construct
  source 1..127: mol_type = other DNA
acatttgttgatacaaccataaaatgataattacacccataaattgataattatcacccataaattgatattgcctctgatcatagtcagaccaacattgctacgacccgtattcgcaccgacactg

SEQ ID NO: 1656 - DNA, 127 bp, synthetic construct
  source 1..127: mol_type = other DNA
acatttgttgatacaaccataaaatgataattacacccataaattgataattatccacccataaattgatattgcctctgatcatagtcagaccaacattgctacgacccgtattcgcaccgacact

SEQ ID NO: 1657 - DNA, 127 bp, synthetic construct
  source 1..127: mol_type = other DNA
acatttgttgatacaaccataaaatgataattacacccataaattgataattatcaacacccataaattgatattgcctctgatcatagtcagaccaacattgctacgacccgtattcgcaccgaca

SEQ ID NO: 1658 - DNA, 127 bp, synthetic construct
  source 1..127: mol_type = other DNA
acatttgttgatacaaccataaaatgataattacacccataaattgataattatcaaacacccataaattgatattgcctctgatcatagtcagaccaacattgctacgacccgtattcgcaccgac

SEQ ID NO: 1659 - DNA, 127 bp, synthetic construct
  source 1..127: mol_type = other DNA
acatttgttgatacaaccataaaatgataattacacccataaattgataattatcaaaacacccataaattgatattgcctctgatcatagtcagaccaacattgctacgacccgtattcgcaccga

SEQ ID NO: 1660 - DNA, 127 bp, synthetic construct
  source 1..127: mol_type = other DNA
acatttgttgatacaaccataaaatgataattaataattatttataatcagcaacttaaccacaaaacacccataaattgataattaacacacccataaattgatattgcctctgatcatagtcaga

SEQ ID NO: 1661 - DNA, 127 bp, synthetic construct
  source 1..127: mol_type = other DNA
acatttgttgatacaaccataaaatgataattaataattatttataatcagcaacttaaccacaaaacacccataaattgataattaacaacacccataaattgatattgcctctgatcatagtcag

SEQ ID NO: 1662 - DNA, 127 bp, synthetic construct
  source 1..127: mol_type = other DNA
acatttgttgatacaaccataaaatgataattaataattatttataatcagcaacttaaccacaaaacacccataaattgataattaacaaacacccataaattgatattgcctctgatcatagtca

SEQ ID NO: 1663 - DNA, 127 bp, synthetic construct
  source 1..127: mol_type = other DNA
acatttgttgatacaaccataaaatgataattaataattatttataatcagcaacttaaccacaaaacacccataaattgataattaacaaaacacccataaattgatattgcctctgatcatagtc

SEQ ID NO: 1664 - DNA, 127 bp, synthetic construct
  source 1..127: mol_type = other DNA
acatttgttgatgcaaccataaaatgataattaataattatttataatcagcaacttaaccacaaaacacccataaattgataattaacaaaacacccataaattgatattgcctctgatcatagtc

SEQ ID NO: 1665 - DNA, 127 bp, synthetic construct
  source 1..127: mol_type = other DNA
acatttgttgatgcaaccataaagtgatatttaataattatttataatcagcaacttaaccacaaaacaaccatatattgatatctcacaaaacaaccataagttgatattttctctgatcatagtc

SEQ ID NO: 1666 - DNA, 127 bp, synthetic construct
  source 1..127: mol_type = other DNA
acatttgttgatacaaccataaaatgataattcacccataaattgataattatcacacccataaattgatattgcctctgatcatagtcagaccaacattgctacgacccgtattcgcaccgacact

SEQ ID NO: 1667 - DNA, 127 bp, synthetic construct
  source 1..127: mol_type = other DNA
acatttgttgatacaaccataaaatgataatcacccataaattgataattatcacacccataaattgatattgcctctgatcatagtcagaccaacattgctacgacccgtattcgcaccgacactg

SEQ ID NO: 1668 - DNA, 127 bp, synthetic construct
  source 1..127: mol_type = other DNA
acatttgttgatacaaccataaaatgataacacccataaattgataattatcacacccataaattgatattgcctctgatcatagtcagaccaacattgctacgacccgtattcgcaccgacactga

SEQ ID NO: 1669 - DNA, 127 bp, synthetic construct
  source 1..127: mol_type = other DNA
acatttgttgatacaaccataaaatgatacacccataaattgataattatcacacccataaattgatattgcctctgatcatagtcagaccaacattgctacgacccgtattcgcaccgacactgac

SEQ ID NO: 1670 - DNA, 127 bp, synthetic construct
  source 1..127: mol_type = other DNA
acatttgttgatacaaccataaaatgatcacccataaattgataattatcacacccataaattgatattgcctctgatcatagtcagaccaacattgctacgacccgtattcgcaccgacactgact

SEQ ID NO: 1671 - DNA, 127 bp, synthetic construct
  source 1..127: mol_type = other DNA
acatttgttgatacaaccataaaatgataattacacccataaattgataatttcacacccataaattgatattgcctctgatcatagtcagaccaacattgctacgacccgtattcgcaccgacact

SEQ ID NO: 1672 - DNA, 127 bp, synthetic construct
  source 1..127: mol_type = other DNA
acatttgttgatacaaccataaaatgataattacacccataaattgataattcacacccataaattgatattgcctctgatcatagtcagaccaacattgctacgacccgtattcgcaccgacactg

SEQ ID NO: 1673 - DNA, 127 bp, synthetic construct
  source 1..127: mol_type = other DNA
acatttgttgatacaaccataaaatgataattacacccataaattgataatcacacccataaattgatattgcctctgatcatagtcagaccaacattgctacgacccgtattcgcaccgacactga

SEQ ID NO: 1674 - DNA, 127 bp, synthetic construct
  source 1..127: mol_type = other DNA
acatttgttgatacaaccataaaatgataattacacccataaattgatatcacacccataaattgatattgcctctgatcatagtcagaccaacattgctacgacccgtattcgcaccgacactgac

SEQ ID NO: 1675 - DNA, 127 bp, synthetic construct
  source 1..127: mol_type = other DNA
acatttgttgatacaaccataaaatgataattacacccataaattgattcacacccataaattgatattgcctctgatcatagtcagaccaacattgctacgacccgtattcgcaccgacactgact

SEQ ID NO: 1676 - DNA, 127 bp, synthetic construct
  source 1..127: mol_type = other DNA
acatttgttgatacaaccataaaatgataattacacccataaattgataattatcacacccataaattgatattgctctgatcatagtcagaccaacattgctacgacccgtattcgcaccgacact

SEQ ID NO: 1677 - DNA, 127 bp, synthetic construct
  source 1..127: mol_type = other DNA
acatttgttgatacaaccataaaatgataattacacccataaattgataattatcacacccataaattgatattctctgatcatagtcagaccaacattgctacgacccgtattcgcaccgacactg

SEQ ID NO: 1678 - DNA, 127 bp, synthetic construct
  source 1..127: mol_type = other DNA
acatttgttgatacaaccataaaatgataattacacccataaattgataattatcacacccataaattgatatctctgatcatagtcagaccaacattgctacgacccgtattcgcaccgacactga

SEQ ID NO: 1679 - DNA, 127 bp, synthetic construct
  source 1..127: mol_type = other DNA
acatttgttgatacaaccataaaatgataattacacccataaattgataattatcacacccataaattgatactctgatcatagtcagaccaacattgctacgacccgtattcgcaccgacactgac

SEQ ID NO: 1680 - DNA, 127 bp, synthetic construct
  source 1..127: mol_type = other DNA
acatttgttgatacaaccataaaatgataattacacccataaattgataattatcacacccataaattgatctctgatcatagtcagaccaacattgctacgacccgtattcgcaccgacactgact

SEQ ID NO: 1681 - DNA, 127 bp, synthetic construct
  source 1..127: mol_type = other DNA
acatttgttgatacaaccataaaatgataattactctgcacccataaattgataattatcacacccataaattgatattgcatcatagtcagaccaacattgctacgacccgtattcgcaccgacac

SEQ ID NO: 1682 - DNA, 127 bp, synthetic construct
  source 1..127: mol_type = other DNA
acatttgttgatacaaccataaaatgataattactctgacacccataaattgataattatcacacccataaattgatattgctcatagtcagaccaacattgctacgacccgtattcgcaccgacac

SEQ ID NO: 1683 - DNA, 127 bp, synthetic construct
  source 1..127: mol_type = other DNA
acatttgttgatacaaccataaaatgataattactctgatcacccataaattgataattatcacacccataaattgatattgccatagtcagaccaacattgctacgacccgtattcgcaccgacac

SEQ ID NO: 1684 - DNA, 127 bp, synthetic construct
  source 1..127: mol_type = other DNA
acatttgttgatacaaccataaaatgataattactctgatcatcacccataaattgataattatcacacccataaattgatattgcagtcagaccaacattgctacgacccgtattcgcaccgacac

SEQ ID NO: 1685 - DNA, 127 bp, synthetic construct
  source 1..127: mol_type = other DNA
acatttgttgatacaaccataaaatgataattactctgatcatagtcacacccataaattgataattatcacacccataaattgatattgcgaccaacattgctacgacccgtattcgcaccgacac

SEQ ID NO: 1686 - DNA, 127 bp, synthetic construct
  source 1..127: mol_type = other DNA
acatttgttgatacaaccataaaatgataattactctgatcatagtcagcacccataaattgataattatcacacccataaattgatattgcaccaacattgctacgacccgtattcgcaccgacac

SEQ ID NO: 1687 - DNA, 127 bp, synthetic construct
  source 1..127: mol_type = other DNA
acatttgttgatacaaccataaaatgataattactctgatcatagtcagacacccataaattgataattatcacacccataaattgatattgcccaacattgctacgacccgtattcgcaccgacac

SEQ ID NO: 1688 - DNA, 127 bp, synthetic construct
  source 1..127: mol_type = other DNA
acatttgttgatacaaccataaaatgataattactctgatcatagtcagaccacacccataaattgataattatcacacccataaattgatattgcacattgctacgacccgtattcgcaccgacac

SEQ ID NO: 1689 - DNA, 127 bp, synthetic construct
  source 1..127: mol_type = other DNA
acatttgttgatacaaccataaaatgataattactctgatcatagtcagaccaacattcacccataaattgataattatcacacccataaattgatattgcgctacgacccgtattcgcaccgacac

SEQ ID NO: 1690 - DNA, 127 bp, synthetic construct
  source 1..127: mol_type = other DNA
acatttgttgatacaaccataaaatgataattactctgatcatagtcagaccaacattgctaccacccataaattgataattatcacacccataaattgatattgcgacccgtattcgcaccgacac

SEQ ID NO: 1691 - DNA, 127 bp, synthetic construct
  source 1..127: mol_type = other DNA
acatttgttgatacaaccataaaatgataattactctgatcatagtcagaccaacattgctacgaccccacccataaattgataattatcacacccataaattgatattgcgtattcgcaccgacac

SEQ ID NO: 1692 - DNA, 127 bp, synthetic construct
  source 1..127: mol_type = other DNA
acatttgttgatacaaccataaaatgataattactctgatcatagtcagaccaacattgctacgacccgtattcacccataaattgataattatcacacccataaattgatattgccgcaccgacac

SEQ ID NO: 1693 - DNA, 127 bp, synthetic construct
  source 1..127: mol_type = other DNA
acatttgttgatacaaccataaaatgataattactctgatcatagtcagaccaacattgctacgacccgtattcgcaccacccataaattgataattatcacacccataaattgatattgccgacac

SEQ ID NO: 1694 - DNA, 127 bp, synthetic construct
  source 1..127: mol_type = other DNA
acatttgttgatacaaccataaaatgataattactctgatcatagtcagaccaacattgctacgacccgtattcgcaccgacacacccataaattgataattatcacacccataaattgatattgcc

SEQ ID NO: 1695 - DNA, 127 bp, synthetic construct
  source 1..127: mol_type = other DNA
acatttgttgatacaaccataaaatgataattacacccataaattgataattatcagtgggtatttaactataacgctctgatcatagtcagaccaacattgctacgacccgtattcgcaccgacac

SEQ ID NO: 1696 - DNA, 127 bp, synthetic construct
  source 1..127: mol_type = other DNA
acatttgttgatacaaccataaaatgataattactctgcacccataaattgataattatcagtgggtatttaactataacgatcatagtcagaccaacattgctacgacccgtattcgcaccgacac

SEQ ID NO: 1697 - DNA, 127 bp, synthetic construct
  source 1..127: mol_type = other DNA
acatttgttgatacaaccataaaatgataattactctgacacccataaattgataattatcagtgggtatttaactataacgtcatagtcagaccaacattgctacgacccgtattcgcaccgacac

SEQ ID NO: 1698 - DNA, 127 bp, synthetic construct
  source 1..127: mol_type = other DNA
acatttgttgatacaaccataaaatgataattactctgatcacccataaattgataattatcagtgggtatttaactataacgcatagtcagaccaacattgctacgacccgtattcgcaccgacac

SEQ ID NO: 1699 - DNA, 127 bp, synthetic construct
  source 1..127: mol_type = other DNA
acatttgttgatacaaccataaaatgataattactctgatcatcacccataaattgataattatcagtgggtatttaactataacgagtcagaccaacattgctacgacccgtattcgcaccgacac

SEQ ID NO: 1700 - DNA, 127 bp, synthetic construct
  source 1..127: mol_type = other DNA
acatttgttgatacaaccataaaatgataattactctgatcatagtcacacccataaattgataattatcagtgggtatttaactataacggaccaacattgctacgacccgtattcgcaccgacac

SEQ ID NO: 1701 - DNA, 127 bp, synthetic construct
  source 1..127: mol_type = other DNA
acatttgttgatacaaccataaaatgataattactctgatcatagtcagcacccataaattgataattatcagtgggtatttaactataacgaccaacattgctacgacccgtattcgcaccgacac

SEQ ID NO: 1702 - DNA, 127 bp, synthetic construct
  source 1..127: mol_type = other DNA
acatttgttgatacaaccataaaatgataattactctgatcatagtcagacacccataaattgataattatcagtgggtatttaactataacgccaacattgctacgacccgtattcgcaccgacac

SEQ ID NO: 1703 - DNA, 127 bp, synthetic construct
  source 1..127: mol_type = other DNA
acatttgttgatacaaccataaaatgataattactctgatcatagtcagaccacacccataaattgataattatcagtgggtatttaactataacgacattgctacgacccgtattcgcaccgacac

SEQ ID NO: 1704 - DNA, 127 bp, synthetic construct
  source 1..127: mol_type = other DNA
acatttgttgatacaaccataaaatgataattactctgatcatagtcagaccaacattcacccataaattgataattatcagtgggtatttaactataacggctacgacccgtattcgcaccgacac

SEQ ID NO: 1705 - DNA, 127 bp, synthetic construct
  source 1..127: mol_type = other DNA
acatttgttgatacaaccataaaatgataattactctgatcatagtcagaccaacattgctaccacccataaattgataattatcagtgggtatttaactataacggacccgtattcgcaccgacac

SEQ ID NO: 1706 - DNA, 127 bp, synthetic construct
  source 1..127: mol_type = other DNA
acatttgttgatacaaccataaaatgataattactctgatcatagtcagaccaacattgctacgaccccacccataaattgataattatcagtgggtatttaactataacggtattcgcaccgacac

SEQ ID NO: 1707 - DNA, 127 bp, synthetic construct
  source 1..127: mol_type = other DNA
acatttgttgatacaaccataaaatgataattactctgatcatagtcagaccaacattgctacgacccgtattcacccataaattgataattatcagtgggtatttaactataacgcgcaccgacac

SEQ ID NO: 1708 - DNA, 127 bp, synthetic construct
  source 1..127: mol_type = other DNA
acatttgttgatacaaccataaaatgataattactctgatcatagtcagaccaacattgctacgacccgtattcgcaccacccataaattgataattatcagtgggtatttaactataacgcgacac

SEQ ID NO: 1709 - DNA, 127 bp, synthetic construct
  source 1..127: mol_type = other DNA
acatttgttgatacaaccataaaatgataattactctgatcatagtcagaccaacattgctacgacccgtattcgcaccgacacacccataaattgataattatcagtgggtatttaactataacgc

SEQ ID NO: 1710 - DNA, 127 bp, synthetic construct
  source 1..127: mol_type = other DNA
acatttgttgatacaaccataaaatgataattactctgatcatagtcagaccaacattgctacgacccgtattcgcaccgacacaacgcacccataaattgataattatcagtgggtatttaactat

SEQ ID NO: 1711 - DNA, 127 bp, synthetic construct
  source 1..127: mol_type = other DNA
acatttgttgatacaaccataaaatgataattactctgatcatagtcagaccaacattgctacgacccgtattcgcaccgacacaacgactatcacccataaattgataattatcagtgggtattta

SEQ ID NO: 1712 - DNA, 127 bp, synthetic construct
  source 1..127: mol_type = other DNA
acatttgttgatacaaccataaaatgataattactctgatcatagtcagaccaacattgctacgacccgtattcgcaccgacacaacgactatatttacacccataaattgataattatcagtgggt

SEQ ID NO: 1713 - DNA, 127 bp, synthetic construct
  source 1..127: mol_type = other DNA
acatttgttgatacaaccataaaatgataattactctgatcatagtcagaccaacattgctacgacccgtattcgcaccgacacaacgactatatttatgggtcacccataaattgataattatcag

SEQ ID NO: 1714 - DNA, 127 bp, synthetic construct
  source 1..127: mol_type = other DNA
acatttgttgatacaaccataaaatgataattaataattatttataatcagcaacttaaccacaaaacacccataaattgataattaacaaaacacccataaattgatattgctgtgaatcgagtat

SEQ ID NO: 1715 - DNA, 127 bp, synthetic construct
  source 1..127: mol_type = other DNA
acatttgttgatacaaccataaaatgataattaataattatttataatcagcaacttaaccacaaaacacccataaattgataattaacaaaagtgggtatttaactataacgtgtgaatcgagtat

SEQ ID NO: 1716 - DNA, 127 bp, synthetic construct
  source 1..127: mol_type = other DNA
acatttgttgatacaaccataaaatgataattacacccataaattgataattatcacacccataaattgatattgccgaggatcatagtcagaccaacattgctacgacccgtattcgcaccgacac

SEQ ID NO: 1717 - DNA, 127 bp, synthetic construct
  source 1..127: mol_type = other DNA
acatttgttgatacaaccataaaatgataattacacccataaattgataattatcacacccataaattgatattgaagaggatcatagtcagaccaacattgctacgacccgtattcgcaccgacac

SEQ ID NO: 1718 - DNA, 127 bp, synthetic construct
  source 1..127: mol_type = other DNA
acatttgttgatacaaccataaaatgataattacacccataaattgataattatcacacccataaattgatatttaagaggatcatagtcagaccaacattgctacgacccgtattcgcaccgacac

SEQ ID NO: 1719 - DNA, 127 bp, synthetic construct
  source 1..127: mol_type = other DNA
acatttgttgatacaaccataaaatgataattacacccataaattgataattatcacacccataaattgatatgtaagaggatcatagtcagaccaacattgctacgacccgtattcgcaccgacac

SEQ ID NO: 1720 - DNA, 127 bp, synthetic construct
  source 1..127: mol_type = other DNA
acatttgttgatacaaccataaaatgataattacacccataaattgataattatcacacccataaattgataggtaagaggatcatagtcagaccaacattgctacgacccgtattcgcaccgacac

SEQ ID NO: 1721 - DNA, 127 bp, synthetic construct
  source 1..127: mol_type = other DNA
acatttgttgatacaaccataaaatgataattacacccataaattgataattatcacacccataaattgatcggtaagaggatcatagtcagaccaacattgctacgacccgtattcgcaccgacac

SEQ ID NO: 1722 - DNA, 127 bp, synthetic construct
  source 1..127: mol_type = other DNA
acatttgttgatacaaccataaaatgataattacacccataaattgataattatcacacccataaattgagcggtaagaggatcatagtcagaccaacattgctacgacccgtattcgcaccgacac

SEQ ID NO: 1723 - DNA, 127 bp, synthetic construct
  source 1..127: mol_type = other DNA
acatttgttgatacaaccataaaatgataattacacccataaattgataattatcacacccataaattgcgcggtaagaggatcatagtcagaccaacattgctacgacccgtattcgcaccgacac

SEQ ID NO: 1724 - DNA, 127 bp, synthetic construct
  source 1..127: mol_type = other DNA
acatttgttgatacaaccataaaatgataattacacccataaattgataattatcacacccataaatttcgcggtaagaggatcatagtcagaccaacattgctacgacccgtattcgcaccgacac

SEQ ID NO: 1725 - DNA, 127 bp, synthetic construct
  source 1..127: mol_type = other DNA
acatttgttgatacaaccataaaatgataattacacccataaattgataattatcacacccataaatgtcgcggtaagaggatcatagtcagaccaacattgctacgacccgtattcgcaccgacac

SEQ ID NO: 1726 - DNA, 127 bp, synthetic construct
  source 1..127: mol_type = other DNA
acatttgttgatacaaccataaaatgataattacacccataaattgataattatcacacccataaaggtcgcggtaagaggatcatagtcagaccaacattgctacgacccgtattcgcaccgacac

SEQ ID NO: 1727 - DNA, 127 bp, synthetic construct
  source 1..127: mol_type = other DNA
acatttgttgatacaaccataaaatgataattacacccataaattgataattatcacacccataacggtcgcggtaagaggatcatagtcagaccaacattgctacgacccgtattcgcaccgacac

SEQ ID NO: 1728 - DNA, 127 bp, synthetic construct
  source 1..127: mol_type = other DNA
acatttgttgatacaaccataaaatgataattacacccataaattgataattatcacacccataccggtcgcggtaagaggatcatagtcagaccaacattgctacgacccgtattcgcaccgacac

SEQ ID NO: 1729 - DNA, 127 bp, synthetic construct
  source 1..127: mol_type = other DNA
acatttgttgatacaaccataaaatgataattacacccataaattgataattatcacacccatcccggtcgcggtaagaggatcatagtcagaccaacattgctacgacccgtattcgcaccgacac

SEQ ID NO: 1730 - DNA, 127 bp, synthetic construct
  source 1..127: mol_type = other DNA
acatttgttgatacaaccataaaatgataattacacccataaattgataattatcacacccagcccggtcgcggtaagaggatcatagtcagaccaacattgctacgacccgtattcgcaccgacac

SEQ ID NO: 1731 - DNA, 127 bp, synthetic construct
  source 1..127: mol_type = other DNA
acatttgttgatacaaccataaaatgataattacacccataaattgataattatcacaccccgcccggtcgcggtaagaggatcatagtcagaccaacattgctacgacccgtattcgcaccgacac

SEQ ID NO: 1732 - DNA, 127 bp, synthetic construct
  source 1..127: mol_type = other DNA
acatttgttgatacaaccataaaatgataattacacccataaattgataattatcacaccacgcccggtcgcggtaagaggatcatagtcagaccaacattgctacgacccgtattcgcaccgacac

SEQ ID NO: 1733 - DNA, 127 bp, synthetic construct
  source 1..127: mol_type = other DNA
acatttgttgatacaaccataaaatgataattacacccataaattgataattatcacacaacgcccggtcgcggtaagaggatcatagtcagaccaacattgctacgacccgtattcgcaccgacac

SEQ ID NO: 1734 - DNA, 127 bp, synthetic construct
  source 1..127: mol_type = other DNA
acatttgttgatacaaccataaaatgataattacacccataaattgataattatcacaaaacgcccggtcgcggtaagaggatcatagtcagaccaacattgctacgacccgtattcgcaccgacac

SEQ ID NO: 1735 - DNA, 127 bp, synthetic construct
  source 1..127: mol_type = other DNA
acatttgttgatacaaccataaaatgataattacacccataaattgataattatcaccaaacgcccggtcgcggtaagaggatcatagtcagaccaacattgctacgacccgtattcgcaccgacac

SEQ ID NO: 1736 - DNA, 127 bp, synthetic construct
  source 1..127: mol_type = other DNA
acatttgttgatacaaccataaaatgataattacacccataaattgataattatcaacaaacgcccggtcgcggtaagaggatcatagtcagaccaacattgctacgacccgtattcgcaccgacac

SEQ ID NO: 1737 - DNA, 127 bp, synthetic construct
  source 1..127: mol_type = other DNA
acatttgttgatacaaccataaaatgataattacacccataaattgataattatccacaaacgcccggtcgcggtaagaggatcatagtcagaccaacattgctacgacccgtattcgcaccgacac

SEQ ID NO: 1738 - DNA, 127 bp, synthetic construct
  source 1..127: mol_type = other DNA
acatttgttgatacaaccataaaatgataattacacccataaattgataattatacacaaacgcccggtcgcggtaagaggatcatagtcagaccaacattgctacgacccgtattcgcaccgacac

SEQ ID NO: 1739 - DNA, 127 bp, synthetic construct
  source 1..127: mol_type = other DNA
acatttgttgatacaaccataaaatgataattacacccataaattgataattagacacaaacgcccggtcgcggtaagaggatcatagtcagaccaacattgctacgacccgtattcgcaccgacac

SEQ ID NO: 1740 - DNA, 127 bp, synthetic construct
  source 1..127: mol_type = other DNA
acatttgttgatacaaccataaaatgataattacacccataaattgataattcgacacaaacgcccggtcgcggtaagaggatcatagtcagaccaacattgctacgacccgtattcgcaccgacac

SEQ ID NO: 1741 - DNA, 127 bp, synthetic construct
  source 1..127: mol_type = other DNA
acatttgttgatacaaccataaaatgataattacacccataaattgataatgcgacacaaacgcccggtcgcggtaagaggatcatagtcagaccaacattgctacgacccgtattcgcaccgacac

SEQ ID NO: 1742 - DNA, 127 bp, synthetic construct
  source 1..127: mol_type = other DNA
acatttgttgatacaaccataaaatgataattacacccataaattgataaggcgacacaaacgcccggtcgcggtaagaggatcatagtcagaccaacattgctacgacccgtattcgcaccgacac

SEQ ID NO: 1743 - DNA, 127 bp, synthetic construct
  source 1..127: mol_type = other DNA
acatttgttgatacaaccataaaatgataattacacccataaattgatacggcgacacaaacgcccggtcgcggtaagaggatcatagtcagaccaacattgctacgacccgtattcgcaccgacac

SEQ ID NO: 1744 - DNA, 127 bp, synthetic construct
  source 1..127: mol_type = other DNA
acatttgttgatacaaccataaaatgataattacacccataaattgatccggcgacacaaacgcccggtcgcggtaagaggatcatagtcagaccaacattgctacgacccgtattcgcaccgacac

SEQ ID NO: 1745 - DNA, 127 bp, synthetic construct
  source 1..127: mol_type = other DNA
acatttgttgatacaaccataaaatgataattacacccataaattgagccggcgacacaaacgcccggtcgcggtaagaggatcatagtcagaccaacattgctacgacccgtattcgcaccgacac

SEQ ID NO: 1746 - DNA, 127 bp, synthetic construct
  source 1..127: mol_type = other DNA
acatttgttgatacaaccataaaatgataattacacccataaattgcgccggcgacacaaacgcccggtcgcggtaagaggatcatagtcagaccaacattgctacgacccgtattcgcaccgacac

SEQ ID NO: 1747 - DNA, 127 bp, synthetic construct
  source 1..127: mol_type = other DNA
acatttgttgatacaaccataaaatgataattacacccataaatttcgccggcgacacaaacgcccggtcgcggtaagaggatcatagtcagaccaacattgctacgacccgtattcgcaccgacac

SEQ ID NO: 1748 - DNA, 127 bp, synthetic construct
  source 1..127: mol_type = other DNA
acatttgttgatacaaccataaaatgataattacacccataaatgtcgccggcgacacaaacgcccggtcgcggtaagaggatcatagtcagaccaacattgctacgacccgtattcgcaccgacac

SEQ ID NO: 1749 - DNA, 127 bp, synthetic construct
  source 1..127: mol_type = other DNA
acatttgttgatacaaccataaaatgataattacacccataaaggtcgccggcgacacaaacgcccggtcgcggtaagaggatcatagtcagaccaacattgctacgacccgtattcgcaccgacac

SEQ ID NO: 1750 - DNA, 127 bp, synthetic construct
  source 1..127: mol_type = other DNA
acatttgttgatacaaccataaaatgataattacacccataacggtcgccggcgacacaaacgcccggtcgcggtaagaggatcatagtcagaccaacattgctacgacccgtattcgcaccgacac

SEQ ID NO: 1751 - DNA, 127 bp, synthetic construct
  source 1..127: mol_type = other DNA
acatttgttgatacaaccataaaatgataattacacccataccggtcgccggcgacacaaacgcccggtcgcggtaagaggatcatagtcagaccaacattgctacgacccgtattcgcaccgacac

SEQ ID NO: 1752 - DNA, 127 bp, synthetic construct
  source 1..127: mol_type = other DNA
acatttgttgatacaaccataaaatgataattacacccatcccggtcgccggcgacacaaacgcccggtcgcggtaagaggatcatagtcagaccaacattgctacgacccgtattcgcaccgacac

SEQ ID NO: 1753 - DNA, 127 bp, synthetic construct
  source 1..127: mol_type = other DNA
acatttgttgatacaaccataaaatgataattacacccagcccggtcgccggcgacacaaacgcccggtcgcggtaagaggatcatagtcagaccaacattgctacgacccgtattcgcaccgacac

SEQ ID NO: 1754 - DNA, 127 bp, synthetic construct
  source 1..127: mol_type = other DNA
acatttgttgatacaaccataaaatgataattacaccccgcccggtcgccggcgacacaaacgcccggtcgcggtaagaggatcatagtcagaccaacattgctacgacccgtattcgcaccgacac

SEQ ID NO: 1755 - DNA, 127 bp, synthetic construct
  source 1..127: mol_type = other DNA
acatttgttgatacaaccataaaatgataattacaccacgcccggtcgccggcgacacaaacgcccggtcgcggtaagaggatcatagtcagaccaacattgctacgacccgtattcgcaccgacac

SEQ ID NO: 1756 - DNA, 127 bp, synthetic construct
  source 1..127: mol_type = other DNA
acatttgttgatacaaccataaaatgataattacacaacgcccggtcgccggcgacacaaacgcccggtcgcggtaagaggatcatagtcagaccaacattgctacgacccgtattcgcaccgacac

SEQ ID NO: 1757 - DNA, 127 bp, synthetic construct
  source 1..127: mol_type = other DNA
acatttgttgatacaaccataaaatgataattacaaaacgcccggtcgccggcgacacaaacgcccggtcgcggtaagaggatcatagtcagaccaacattgctacgacccgtattcgcaccgacac

SEQ ID NO: 1758 - DNA, 127 bp, synthetic construct
  source 1..127: mol_type = other DNA
acatttgttgatacaaccataaaatgataattaccaaacgcccggtcgccggcgacacaaacgcccggtcgcggtaagaggatcatagtcagaccaacattgctacgacccgtattcgcaccgacac

SEQ ID NO: 1759 - DNA, 127 bp, synthetic construct
  source 1..127: mol_type = other DNA
acatttgttgatacaaccataaaatgataattaacaaacgcccggtcgccggcgacacaaacgcccggtcgcggtaagaggatcatagtcagaccaacattgctacgacccgtattcgcaccgacac

SEQ ID NO: 1760 - DNA, 127 bp, synthetic construct
  source 1..127: mol_type = other DNA
acatttgttgatacaaccataaaatgataattcacaaacgcccggtcgccggcgacacaaacgcccggtcgcggtaagaggatcatagtcagaccaacattgctacgacccgtattcgcaccgacac

SEQ ID NO: 1761 - DNA, 127 bp, synthetic construct
  source 1..127: mol_type = other DNA
acatttgttgatacaaccataaaatgataatgcacaaacgcccggtcgccggcgacacaaacgcccggtcgcggtaagaggatcatagtcagaccaacattgctacgacccgtattcgcaccgacac

SEQ ID NO: 1762 - DNA, 127 bp, synthetic construct
  source 1..127: mol_type = other DNA
acatttgttgatacaaccataaaatgataaggcacaaacgcccggtcgccggcgacacaaacgcccggtcgcggtaagaggatcatagtcagaccaacattgctacgacccgtattcgcaccgacac

SEQ ID NO: 1763 - DNA, 127 bp, synthetic construct
  source 1..127: mol_type = other DNA
acatttgttgatacaaccataaaatgatacggcacaaacgcccggtcgccggcgacacaaacgcccggtcgcggtaagaggatcatagtcagaccaacattgctacgacccgtattcgcaccgacac

SEQ ID NO: 1764 - DNA, 127 bp, synthetic construct
  source 1..127: mol_type = other DNA
acatttgttgatacaaccataaaatgatccggcacaaacgcccggtcgccggcgacacaaacgcccggtcgcggtaagaggatcatagtcagaccaacattgctacgacccgtattcgcaccgacac

SEQ ID NO: 1765 - DNA, 127 bp, synthetic construct
  source 1..127: mol_type = other DNA
acatttgttgatacaaccataaaatgagccggcacaaacgcccggtcgccggcgacacaaacgcccggtcgcggtaagaggatcatagtcagaccaacattgctacgacccgtattcgcaccgacac

SEQ ID NO: 1766 - DNA, 127 bp, synthetic construct
  source 1..127: mol_type = other DNA
acatttgttgatacaaccataaaatgcgccggcacaaacgcccggtcgccggcgacacaaacgcccggtcgcggtaagaggatcatagtcagaccaacattgctacgacccgtattcgcaccgacac

SEQ ID NO: 1767 - DNA, 127 bp, synthetic construct
  source 1..127: mol_type = other DNA
acatttgttgatacaaccataaaattcgccggcacaaacgcccggtcgccggcgacacaaacgcccggtcgcggtaagaggatcatagtcagaccaacattgctacgacccgtattcgcaccgacac

SEQ ID NO: 1768 - DNA, 127 bp, synthetic construct
  source 1..127: mol_type = other DNA
acatttgttgatacaaccataaaagtcgccggcacaaacgcccggtcgccggcgacacaaacgcccggtcgcggtaagaggatcatagtcagaccaacattgctacgacccgtattcgcaccgacac

SEQ ID NO: 1769 - DNA, 127 bp, synthetic construct
  source 1..127: mol_type = other DNA
acatttgttgatacaaccataaacgtcgccggcacaaacgcccggtcgccggcgacacaaacgcccggtcgcggtaagaggatcatagtcagaccaacattgctacgacccgtattcgcaccgacac

SEQ ID NO: 1770 - DNA, 127 bp, synthetic construct
  source 1..127: mol_type = other DNA
acatttgttgatacaaccataaccgtcgccggcacaaacgcccggtcgccggcgacacaaacgcccggtcgcggtaagaggatcatagtcagaccaacattgctacgacccgtattcgcaccgacac

SEQ ID NO: 1771 - DNA, 127 bp, synthetic construct
  source 1..127: mol_type = other DNA
acatttgttgatacaaccatacccgtcgccggcacaaacgcccggtcgccggcgacacaaacgcccggtcgcggtaagaggatcatagtcagaccaacattgctacgacccgtattcgcaccgacac

SEQ ID NO: 1772 - DNA, 127 bp, synthetic construct
  source 1..127: mol_type = other DNA
acatttgttgatacaaccatccccgtcgccggcacaaacgcccggtcgccggcgacacaaacgcccggtcgcggtaagaggatcatagtcagaccaacattgctacgacccgtattcgcaccgacac

SEQ ID NO: 1773 - DNA, 127 bp, synthetic construct
  source 1..127: mol_type = other DNA
acatttgttgatacaaccagccccgtcgccggcacaaacgcccggtcgccggcgacacaaacgcccggtcgcggtaagaggatcatagtcagaccaacattgctacgacccgtattcgcaccgacac

SEQ ID NO: 1774 - DNA, 127 bp, synthetic construct
  source 1..127: mol_type = other DNA
acatttgttgatacaacccgccccgtcgccggcacaaacgcccggtcgccggcgacacaaacgcccggtcgcggtaagaggatcatagtcagaccaacattgctacgacccgtattcgcaccgacac

SEQ ID NO: 1775 - DNA, 127 bp, synthetic construct
  source 1..127: mol_type = other DNA
acatttgttgatacaacacgccccgtcgccggcacaaacgcccggtcgccggcgacacaaacgcccggtcgcggtaagaggatcatagtcagaccaacattgctacgacccgtattcgcaccgacac

SEQ ID NO: 1776 - DNA, 127 bp, synthetic construct
  source 1..127: mol_type = other DNA
acatttgttgatacaaaacgccccgtcgccggcacaaacgcccggtcgccggcgacacaaacgcccggtcgcggtaagaggatcatagtcagaccaacattgctacgacccgtattcgcaccgacac

SEQ ID NO: 1777 - DNA, 127 bp, synthetic construct
  source 1..127: mol_type = other DNA
acatttgttgatacacaacgccccgtcgccggcacaaacgcccggtcgccggcgacacaaacgcccggtcgcggtaagaggatcatagtcagaccaacattgctacgacccgtattcgcaccgacac

SEQ ID NO: 1778 - DNA, 127 bp, synthetic construct
  source 1..127: mol_type = other DNA
acatttgttgatacccaacgccccgtcgccggcacaaacgcccggtcgccggcgacacaaacgcccggtcgcggtaagaggatcatagtcagaccaacattgctacgacccgtattcgcaccgacac

SEQ ID NO: 1779 - DNA, 127 bp, synthetic construct
  source 1..127: mol_type = other DNA
acatttgttgataaccaacgccccgtcgccggcacaaacgcccggtcgccggcgacacaaacgcccggtcgcggtaagaggatcatagtcagaccaacattgctacgacccgtattcgcaccgacac

SEQ ID NO: 1780 - DNA, 127 bp, synthetic construct
  source 1..127: mol_type = other DNA
acatttgttgatacaaccataaaatgataattacaaccataaaatgataattatcacaaccataaaatgataattactctgatcatagtcagaccaacattgctacgacccgtattcgcaccgacac

SEQ ID NO: 1781 - DNA, 127 bp, synthetic construct
  source 1..127: mol_type = other DNA
acatttgttgatacaaccataaaatgataattacaaccataaaatgataattatcacacccataaattgataattactctgatcatagtcagaccaacattgctacgacccgtattcgcaccgacac

SEQ ID NO: 1782 - DNA, 127 bp, synthetic construct
  source 1..127: mol_type = other DNA
acatttgttgatacaaccataaaatgataattacaaccataaaatgataattatcacacccataaattgatattgcctctgatcatagtcagaccaacattgctacgacccgtattcgcaccgacac

SEQ ID NO: 1783 - DNA, 127 bp, synthetic construct
  source 1..127: mol_type = other DNA
acatttgttgatacaaccataaaatgataattacaaccataaaatgataattatcacaaccataagttgatattttctctgatcatagtcagaccaacattgctacgacccgtattcgcaccgacac

SEQ ID NO: 1784 - DNA, 127 bp, synthetic construct
  source 1..127: mol_type = other DNA
acatttgttgatacaaccataaaatgataattacaaccataaaatgataattatcacaaccatatattgatatctcctctgatcatagtcagaccaacattgctacgacccgtattcgcaccgacac

SEQ ID NO: 1785 - DNA, 127 bp, synthetic construct
  source 1..127: mol_type = other DNA
acatttgttgatacaaccataaaatgataattacaaccataaaatgataattatcacaaccataaagtgatatttactctgatcatagtcagaccaacattgctacgacccgtattcgcaccgacac

SEQ ID NO: 1786 - DNA, 127 bp, synthetic construct
  source 1..127: mol_type = other DNA
acatttgttgatacaaccataaaatgataattacacccataaattgataattatcacaaccataaaatgataattactctgatcatagtcagaccaacattgctacgacccgtattcgcaccgacac

SEQ ID NO: 1787 - DNA, 127 bp, synthetic construct
  source 1..127: mol_type = other DNA
acatttgttgatacaaccataaaatgataattacacccataaattgataattatcacacccataaattgataattactctgatcatagtcagaccaacattgctacgacccgtattcgcaccgacac

SEQ ID NO: 1788 - DNA, 127 bp, synthetic construct
  source 1..127: mol_type = other DNA
acatttgttgatacaaccataaaatgataattacacccataaattgataattatcacaaccataagttgatattttctctgatcatagtcagaccaacattgctacgacccgtattcgcaccgacac

SEQ ID NO: 1789 - DNA, 127 bp, synthetic construct
  source 1..127: mol_type = other DNA
acatttgttgatacaaccataaaatgataattacacccataaattgataattatcacaaccatatattgatatctcctctgatcatagtcagaccaacattgctacgacccgtattcgcaccgacac

SEQ ID NO: 1790 - DNA, 127 bp, synthetic construct
  source 1..127: mol_type = other DNA
acatttgttgatacaaccataaaatgataattacacccataaattgataattatcacaaccataaagtgatatttactctgatcatagtcagaccaacattgctacgacccgtattcgcaccgacac

SEQ ID NO: 1791 - DNA, 127 bp, synthetic construct
  source 1..127: mol_type = other DNA
acatttgttgatacaaccataaaatgataattacacccataaattgatattgctcacaaccataaaatgataattactctgatcatagtcagaccaacattgctacgacccgtattcgcaccgacac

SEQ ID NO: 1792 - DNA, 127 bp, synthetic construct
  source 1..127: mol_type = other DNA
acatttgttgatacaaccataaaatgataattacacccataaattgatattgctcacacccataaattgataattactctgatcatagtcagaccaacattgctacgacccgtattcgcaccgacac

SEQ ID NO: 1793 - DNA, 127 bp, synthetic construct
  source 1..127: mol_type = other DNA
acatttgttgatacaaccataaaatgataattacacccataaattgatattgctcacacccataaattgatattgcctctgatcatagtcagaccaacattgctacgacccgtattcgcaccgacac

SEQ ID NO: 1794 - DNA, 127 bp, synthetic construct
  source 1..127: mol_type = other DNA
acatttgttgatacaaccataaaatgataattacacccataaattgatattgctcacaaccataagttgatattttctctgatcatagtcagaccaacattgctacgacccgtattcgcaccgacac

SEQ ID NO: 1795 - DNA, 127 bp, synthetic construct
  source 1..127: mol_type = other DNA
acatttgttgatacaaccataaaatgataattacacccataaattgatattgctcacaaccatatattgatatctcctctgatcatagtcagaccaacattgctacgacccgtattcgcaccgacac

SEQ ID NO: 1796 - DNA, 127 bp, synthetic construct
  source 1..127: mol_type = other DNA
acatttgttgatacaaccataaaatgataattacacccataaattgatattgctcacaaccataaagtgatatttactctgatcatagtcagaccaacattgctacgacccgtattcgcaccgacac

SEQ ID NO: 1797 - DNA, 127 bp, synthetic construct
  source 1..127: mol_type = other DNA
acatttgttgatacaaccataaaatgataattacaaccataagttgatatttttcacaaccataaaatgataattactctgatcatagtcagaccaacattgctacgacccgtattcgcaccgacac

SEQ ID NO: 1798 - DNA, 127 bp, synthetic construct
  source 1..127: mol_type = other DNA
acatttgttgatacaaccataaaatgataattacaaccataagttgatatttttcacacccataaattgataattactctgatcatagtcagaccaacattgctacgacccgtattcgcaccgacac

SEQ ID NO: 1799 - DNA, 127 bp, synthetic construct
  source 1..127: mol_type = other DNA
acatttgttgatacaaccataaaatgataattacaaccataagttgatatttttcacacccataaattgatattgcctctgatcatagtcagaccaacattgctacgacccgtattcgcaccgacac

SEQ ID NO: 1800 - DNA, 127 bp, synthetic construct
  source 1..127: mol_type = other DNA
acatttgttgatacaaccataaaatgataattacaaccataagttgatatttttcacaaccataagttgatattttctctgatcatagtcagaccaacattgctacgacccgtattcgcaccgacac

SEQ ID NO: 1801 - DNA, 127 bp, synthetic construct
  source 1..127: mol_type = other DNA
acatttgttgatacaaccataaaatgataattacaaccataagttgatatttttcacaaccatatattgatatctcctctgatcatagtcagaccaacattgctacgacccgtattcgcaccgacac

SEQ ID NO: 1802 - DNA, 127 bp, synthetic construct
  source 1..127: mol_type = other DNA
acatttgttgatacaaccataaaatgataattacaaccataagttgatatttttcacaaccataaagtgatatttactctgatcatagtcagaccaacattgctacgacccgtattcgcaccgacac

SEQ ID NO: 1803 - DNA, 127 bp, synthetic construct
  source 1..127: mol_type = other DNA
acatttgttgatacaaccataaaatgataattacaaccatatattgatatctctcacaaccataaaatgataattactctgatcatagtcagaccaacattgctacgacccgtattcgcaccgacac

SEQ ID NO: 1804 - DNA, 127 bp, synthetic construct
  source 1..127: mol_type = other DNA
acatttgttgatacaaccataaaatgataattacaaccatatattgatatctctcacacccataaattgataattactctgatcatagtcagaccaacattgctacgacccgtattcgcaccgacac

SEQ ID NO: 1805 - DNA, 127 bp, synthetic construct
  source 1..127: mol_type = other DNA
acatttgttgatacaaccataaaatgataattacaaccatatattgatatctctcacacccataaattgatattgcctctgatcatagtcagaccaacattgctacgacccgtattcgcaccgacac

SEQ ID NO: 1806 - DNA, 127 bp, synthetic construct
  source 1..127: mol_type = other DNA
acatttgttgatacaaccataaaatgataattacaaccatatattgatatctctcacaaccataagttgatattttctctgatcatagtcagaccaacattgctacgacccgtattcgcaccgacac

SEQ ID NO: 1807 - DNA, 127 bp, synthetic construct
  source 1..127: mol_type = other DNA
acatttgttgatacaaccataaaatgataattacaaccatatattgatatctctcacaaccatatattgatatctcctctgatcatagtcagaccaacattgctacgacccgtattcgcaccgacac

SEQ ID NO: 1808 - DNA, 127 bp, synthetic construct
  source 1..127: mol_type = other DNA
acatttgttgatacaaccataaaatgataattacaaccatatattgatatctctcacaaccataaagtgatatttactctgatcatagtcagaccaacattgctacgacccgtattcgcaccgacac

SEQ ID NO: 1809 - DNA, 127 bp, synthetic construct
  source 1..127: mol_type = other DNA
acatttgttgatacaaccataaaatgataattacaaccataaagtgatatttatcacaaccataaaatgataattactctgatcatagtcagaccaacattgctacgacccgtattcgcaccgacac

SEQ ID NO: 1810 - DNA, 127 bp, synthetic construct
  source 1..127: mol_type = other DNA
acatttgttgatacaaccataaaatgataattacaaccataaagtgatatttatcacacccataaattgataattactctgatcatagtcagaccaacattgctacgacccgtattcgcaccgacac

SEQ ID NO: 1811 - DNA, 127 bp, synthetic construct
  source 1..127: mol_type = other DNA
acatttgttgatacaaccataaaatgataattacaaccataaagtgatatttatcacacccataaattgatattgcctctgatcatagtcagaccaacattgctacgacccgtattcgcaccgacac

SEQ ID NO: 1812 - DNA, 127 bp, synthetic construct
  source 1..127: mol_type = other DNA
acatttgttgatacaaccataaaatgataattacaaccataaagtgatatttatcacaaccataagttgatattttctctgatcatagtcagaccaacattgctacgacccgtattcgcaccgacac

SEQ ID NO: 1813 - DNA, 127 bp, synthetic construct
  source 1..127: mol_type = other DNA
acatttgttgatacaaccataaaatgataattacaaccataaagtgatatttatcacaaccatatattgatatctcctctgatcatagtcagaccaacattgctacgacccgtattcgcaccgacac

SEQ ID NO: 1814 - DNA, 127 bp, synthetic construct
  source 1..127: mol_type = other DNA
acatttgttgatacaaccataaaatgataattacaaccataaagtgatatttatcacaaccataaagtgatatttactctgatcatagtcagaccaacattgctacgacccgtattcgcaccgacac

SEQ ID NO: 1815 - DNA, 127 bp, synthetic construct
  source 1..127: mol_type = other DNA
acatttgttgatacacccataaattgataattacaaccataaaatgataattatcacaaccataaaatgataattactctgatcatagtcagaccaacattgctacgacccgtattcgcaccgacac

SEQ ID NO: 1816 - DNA, 127 bp, synthetic construct
  source 1..127: mol_type = other DNA
acatttgttgatacacccataaattgataattacaaccataaaatgataattatcacacccataaattgataattactctgatcatagtcagaccaacattgctacgacccgtattcgcaccgacac

SEQ ID NO: 1817 - DNA, 127 bp, synthetic construct
  source 1..127: mol_type = other DNA
acatttgttgatacacccataaattgataattacaaccataaaatgataattatcacacccataaattgatattgcctctgatcatagtcagaccaacattgctacgacccgtattcgcaccgacac

SEQ ID NO: 1818 - DNA, 127 bp, synthetic construct
  source 1..127: mol_type = other DNA
acatttgttgatacacccataaattgataattacaaccataaaatgataattatcacaaccataagttgatattttctctgatcatagtcagaccaacattgctacgacccgtattcgcaccgacac

SEQ ID NO: 1819 - DNA, 127 bp, synthetic construct
  source 1..127: mol_type = other DNA
acatttgttgatacacccataaattgataattacaaccataaaatgataattatcacaaccatatattgatatctcctctgatcatagtcagaccaacattgctacgacccgtattcgcaccgacac

SEQ ID NO: 1820 - DNA, 127 bp, synthetic construct
  source 1..127: mol_type = other DNA
acatttgttgatacacccataaattgataattacaaccataaaatgataattatcacaaccataaagtgatatttactctgatcatagtcagaccaacattgctacgacccgtattcgcaccgacac

SEQ ID NO: 1821 - DNA, 127 bp, synthetic construct
  source 1..127: mol_type = other DNA
acatttgttgatacacccataaattgataattacacccataaattgataattatcacaaccataaaatgataattactctgatcatagtcagaccaacattgctacgacccgtattcgcaccgacac

SEQ ID NO: 1822 - DNA, 127 bp, synthetic construct
  source 1..127: mol_type = other DNA
acatttgttgatacacccataaattgataattacacccataaattgataattatcacacccataaattgataattactctgatcatagtcagaccaacattgctacgacccgtattcgcaccgacac

SEQ ID NO: 1823 - DNA, 127 bp, synthetic construct
  source 1..127: mol_type = other DNA
acatttgttgatacacccataaattgataattacacccataaattgataattatcacacccataaattgatattgcctctgatcatagtcagaccaacattgctacgacccgtattcgcaccgacac

SEQ ID NO: 1824 - DNA, 127 bp, synthetic construct
  source 1..127: mol_type = other DNA
acatttgttgatacacccataaattgataattacacccataaattgataattatcacaaccataagttgatattttctctgatcatagtcagaccaacattgctacgacccgtattcgcaccgacac

SEQ ID NO: 1825 - DNA, 127 bp, synthetic construct
  source 1..127: mol_type = other DNA
acatttgttgatacacccataaattgataattacacccataaattgataattatcacaaccatatattgatatctcctctgatcatagtcagaccaacattgctacgacccgtattcgcaccgacac

SEQ ID NO: 1826 - DNA, 127 bp, synthetic construct
  source 1..127: mol_type = other DNA
acatttgttgatacacccataaattgataattacacccataaattgataattatcacaaccataaagtgatatttactctgatcatagtcagaccaacattgctacgacccgtattcgcaccgacac

SEQ ID NO: 1827 - DNA, 127 bp, synthetic construct
  source 1..127: mol_type = other DNA
acatttgttgatacacccataaattgataattacacccataaattgatattgctcacaaccataaaatgataattactctgatcatagtcagaccaacattgctacgacccgtattcgcaccgacac

SEQ ID NO: 1828 - DNA, 127 bp, synthetic construct
  source 1..127: mol_type = other DNA
acatttgttgatacacccataaattgataattacacccataaattgatattgctcacacccataaattgataattactctgatcatagtcagaccaacattgctacgacccgtattcgcaccgacac

SEQ ID NO: 1829 - DNA, 127 bp, synthetic construct
  source 1..127: mol_type = other DNA
acatttgttgatacacccataaattgataattacacccataaattgatattgctcacacccataaattgatattgcctctgatcatagtcagaccaacattgctacgacccgtattcgcaccgacac

SEQ ID NO: 1830 - DNA, 127 bp, synthetic construct
  source 1..127: mol_type = other DNA
acatttgttgatacacccataaattgataattacacccataaattgatattgctcacaaccataagttgatattttctctgatcatagtcagaccaacattgctacgacccgtattcgcaccgacac

SEQ ID NO: 1831 - DNA, 127 bp, synthetic construct
  source 1..127: mol_type = other DNA
acatttgttgatacacccataaattgataattacacccataaattgatattgctcacaaccatatattgatatctcctctgatcatagtcagaccaacattgctacgacccgtattcgcaccgacac

SEQ ID NO: 1832 - DNA, 127 bp, synthetic construct
  source 1..127: mol_type = other DNA
acatttgttgatacacccataaattgataattacacccataaattgatattgctcacaaccataaagtgatatttactctgatcatagtcagaccaacattgctacgacccgtattcgcaccgacac

SEQ ID NO: 1833 - DNA, 127 bp, synthetic construct
  source 1..127: mol_type = other DNA
acatttgttgatacacccataaattgataattacaaccataagttgatatttttcacaaccataaaatgataattactctgatcatagtcagaccaacattgctacgacccgtattcgcaccgacac

SEQ ID NO: 1834 - DNA, 127 bp, synthetic construct
  source 1..127: mol_type = other DNA
acatttgttgatacacccataaattgataattacaaccataagttgatatttttcacacccataaattgataattactctgatcatagtcagaccaacattgctacgacccgtattcgcaccgacac

SEQ ID NO: 1835 - DNA, 127 bp, synthetic construct
  source 1..127: mol_type = other DNA
acatttgttgatacacccataaattgataattacaaccataagttgatatttttcacacccataaattgatattgcctctgatcatagtcagaccaacattgctacgacccgtattcgcaccgacac

SEQ ID NO: 1836 - DNA, 127 bp, synthetic construct
  source 1..127: mol_type = other DNA
acatttgttgatacacccataaattgataattacaaccataagttgatatttttcacaaccataagttgatattttctctgatcatagtcagaccaacattgctacgacccgtattcgcaccgacac

SEQ ID NO: 1837 - DNA, 127 bp, synthetic construct
  source 1..127: mol_type = other DNA
acatttgttgatacacccataaattgataattacaaccataagttgatatttttcacaaccatatattgatatctcctctgatcatagtcagaccaacattgctacgacccgtattcgcaccgacac

SEQ ID NO: 1838 - DNA, 127 bp, synthetic construct
  source 1..127: mol_type = other DNA
acatttgttgatacacccataaattgataattacaaccataagttgatatttttcacaaccataaagtgatatttactctgatcatagtcagaccaacattgctacgacccgtattcgcaccgacac

SEQ ID NO: 1839 - DNA, 127 bp, synthetic construct
  source 1..127: mol_type = other DNA
acatttgttgatacacccataaattgataattacaaccatatattgatatctctcacaaccataaaatgataattactctgatcatagtcagaccaacattgctacgacccgtattcgcaccgacac

SEQ ID NO: 1840 - DNA, 127 bp, synthetic construct
  source 1..127: mol_type = other DNA
acatttgttgatacacccataaattgataattacaaccatatattgatatctctcacacccataaattgataattactctgatcatagtcagaccaacattgctacgacccgtattcgcaccgacac

SEQ ID NO: 1841 - DNA, 127 bp, synthetic construct
  source 1..127: mol_type = other DNA
acatttgttgatacacccataaattgataattacaaccatatattgatatctctcacacccataaattgatattgcctctgatcatagtcagaccaacattgctacgacccgtattcgcaccgacac

SEQ ID NO: 1842 - DNA, 127 bp, synthetic construct
  source 1..127: mol_type = other DNA
acatttgttgatacacccataaattgataattacaaccatatattgatatctctcacaaccataagttgatattttctctgatcatagtcagaccaacattgctacgacccgtattcgcaccgacac

SEQ ID NO: 1843 - DNA, 127 bp, synthetic construct
  source 1..127: mol_type = other DNA
acatttgttgatacacccataaattgataattacaaccatatattgatatctctcacaaccatatattgatatctcctctgatcatagtcagaccaacattgctacgacccgtattcgcaccgacac

SEQ ID NO: 1844 - DNA, 127 bp, synthetic construct
  source 1..127: mol_type = other DNA
acatttgttgatacacccataaattgataattacaaccatatattgatatctctcacaaccataaagtgatatttactctgatcatagtcagaccaacattgctacgacccgtattcgcaccgacac

SEQ ID NO: 1845 - DNA, 127 bp, synthetic construct
  source 1..127: mol_type = other DNA
acatttgttgatacacccataaattgataattacaaccataaagtgatatttatcacaaccataaaatgataattactctgatcatagtcagaccaacattgctacgacccgtattcgcaccgacac

SEQ ID NO: 1846 - DNA, 127 bp, synthetic construct
  source 1..127: mol_type = other DNA
acatttgttgatacacccataaattgataattacaaccataaagtgatatttatcacacccataaattgataattactctgatcatagtcagaccaacattgctacgacccgtattcgcaccgacac

SEQ ID NO: 1847 - DNA, 127 bp, synthetic construct
  source 1..127: mol_type = other DNA
acatttgttgatacacccataaattgataattacaaccataaagtgatatttatcacacccataaattgatattgcctctgatcatagtcagaccaacattgctacgacccgtattcgcaccgacac

SEQ ID NO: 1848 - DNA, 127 bp, synthetic construct
  source 1..127: mol_type = other DNA
acatttgttgatacacccataaattgataattacaaccataaagtgatatttatcacaaccataagttgatattttctctgatcatagtcagaccaacattgctacgacccgtattcgcaccgacac

SEQ ID NO: 1849 - DNA, 127 bp, synthetic construct
  source 1..127: mol_type = other DNA
acatttgttgatacacccataaattgataattacaaccataaagtgatatttatcacaaccatatattgatatctcctctgatcatagtcagaccaacattgctacgacccgtattcgcaccgacac

SEQ ID NO: 1850 - DNA, 127 bp, synthetic construct
  source 1..127: mol_type = other DNA
acatttgttgatacacccataaattgataattacaaccataaagtgatatttatcacaaccataaagtgatatttactctgatcatagtcagaccaacattgctacgacccgtattcgcaccgacac

SEQ ID NO: 1851 - DNA, 127 bp, synthetic construct
  source 1..127: mol_type = other DNA
acatttgttgatacacccataaattgatattgccaaccataaaatgataattatcacaaccataaaatgataattactctgatcatagtcagaccaacattgctacgacccgtattcgcaccgacac

SEQ ID NO: 1852 - DNA, 127 bp, synthetic construct
  source 1..127: mol_type = other DNA
acatttgttgatacacccataaattgatattgccaaccataaaatgataattatcacacccataaattgataattactctgatcatagtcagaccaacattgctacgacccgtattcgcaccgacac

SEQ ID NO: 1853 - DNA, 127 bp, synthetic construct
  source 1..127: mol_type = other DNA
acatttgttgatacacccataaattgatattgccaaccataaaatgataattatcacacccataaattgatattgcctctgatcatagtcagaccaacattgctacgacccgtattcgcaccgacac

SEQ ID NO: 1854 - DNA, 127 bp, synthetic construct
  source 1..127: mol_type = other DNA
acatttgttgatacacccataaattgatattgccaaccataaaatgataattatcacaaccataagttgatattttctctgatcatagtcagaccaacattgctacgacccgtattcgcaccgacac

SEQ ID NO: 1855 - DNA, 127 bp, synthetic construct
  source 1..127: mol_type = other DNA
acatttgttgatacacccataaattgatattgccaaccataaaatgataattatcacaaccatatattgatatctcctctgatcatagtcagaccaacattgctacgacccgtattcgcaccgacac

SEQ ID NO: 1856 - DNA, 127 bp, synthetic construct
  source 1..127: mol_type = other DNA
acatttgttgatacacccataaattgatattgccaaccataaaatgataattatcacaaccataaagtgatatttactctgatcatagtcagaccaacattgctacgacccgtattcgcaccgacac

SEQ ID NO: 1857 - DNA, 127 bp, synthetic construct
  source 1..127: mol_type = other DNA
acatttgttgatacacccataaattgatattgccacccataaattgataattatcacaaccataaaatgataattactctgatcatagtcagaccaacattgctacgacccgtattcgcaccgacac

SEQ ID NO: 1858 - DNA, 127 bp, synthetic construct
  source 1..127: mol_type = other DNA
acatttgttgatacacccataaattgatattgccacccataaattgataattatcacacccataaattgataattactctgatcatagtcagaccaacattgctacgacccgtattcgcaccgacac

SEQ ID NO: 1859 - DNA, 127 bp, synthetic construct
  source 1..127: mol_type = other DNA
acatttgttgatacacccataaattgatattgccacccataaattgataattatcacacccataaattgatattgcctctgatcatagtcagaccaacattgctacgacccgtattcgcaccgacac

SEQ ID NO: 1860 - DNA, 127 bp, synthetic construct
  source 1..127: mol_type = other DNA
acatttgttgatacacccataaattgatattgccacccataaattgataattatcacaaccataagttgatattttctctgatcatagtcagaccaacattgctacgacccgtattcgcaccgacac

SEQ ID NO: 1861 - DNA, 127 bp, synthetic construct
  source 1..127: mol_type = other DNA
acatttgttgatacacccataaattgatattgccacccataaattgataattatcacaaccatatattgatatctcctctgatcatagtcagaccaacattgctacgacccgtattcgcaccgacac

SEQ ID NO: 1862 - DNA, 127 bp, synthetic construct
  source 1..127: mol_type = other DNA
acatttgttgatacacccataaattgatattgccacccataaattgataattatcacaaccataaagtgatatttactctgatcatagtcagaccaacattgctacgacccgtattcgcaccgacac

SEQ ID NO: 1863 - DNA, 127 bp, synthetic construct
  source 1..127: mol_type = other DNA
acatttgttgatacacccataaattgatattgccacccataaattgatattgctcacaaccataaaatgataattactctgatcatagtcagaccaacattgctacgacccgtattcgcaccgacac

SEQ ID NO: 1864 - DNA, 127 bp, synthetic construct
  source 1..127: mol_type = other DNA
acatttgttgatacacccataaattgatattgccacccataaattgatattgctcacacccataaattgataattactctgatcatagtcagaccaacattgctacgacccgtattcgcaccgacac

SEQ ID NO: 1865 - DNA, 127 bp, synthetic construct
  source 1..127: mol_type = other DNA
acatttgttgatacacccataaattgatattgccacccataaattgatattgctcacacccataaattgatattgcctctgatcatagtcagaccaacattgctacgacccgtattcgcaccgacac

SEQ ID NO: 1866 - DNA, 127 bp, synthetic construct
  source 1..127: mol_type = other DNA
acatttgttgatacacccataaattgatattgccacccataaattgatattgctcacaaccataagttgatattttctctgatcatagtcagaccaacattgctacgacccgtattcgcaccgacac

SEQ ID NO: 1867 - DNA, 127 bp, synthetic construct
  source 1..127: mol_type = other DNA
acatttgttgatacacccataaattgatattgccacccataaattgatattgctcacaaccatatattgatatctcctctgatcatagtcagaccaacattgctacgacccgtattcgcaccgacac

SEQ ID NO: 1868 - DNA, 127 bp, synthetic construct
  source 1..127: mol_type = other DNA
acatttgttgatacacccataaattgatattgccacccataaattgatattgctcacaaccataaagtgatatttactctgatcatagtcagaccaacattgctacgacccgtattcgcaccgacac

SEQ ID NO: 1869 - DNA, 127 bp, synthetic construct
  source 1..127: mol_type = other DNA
acatttgttgatacacccataaattgatattgccaaccataagttgatatttttcacaaccataaaatgataattactctgatcatagtcagaccaacattgctacgacccgtattcgcaccgacac

SEQ ID NO: 1870 - DNA, 127 bp, synthetic construct
  source 1..127: mol_type = other DNA
acatttgttgatacacccataaattgatattgccaaccataagttgatatttttcacacccataaattgataattactctgatcatagtcagaccaacattgctacgacccgtattcgcaccgacac

SEQ ID NO: 1871 - DNA, 127 bp, synthetic construct
  source 1..127: mol_type = other DNA
acatttgttgatacacccataaattgatattgccaaccataagttgatatttttcacacccataaattgatattgcctctgatcatagtcagaccaacattgctacgacccgtattcgcaccgacac

SEQ ID NO: 1872 - DNA, 127 bp, synthetic construct
  source 1..127: mol_type = other DNA
acatttgttgatacacccataaattgatattgccaaccataagttgatatttttcacaaccataagttgatattttctctgatcatagtcagaccaacattgctacgacccgtattcgcaccgacac

SEQ ID NO: 1873 - DNA, 127 bp, synthetic construct
  source 1..127: mol_type = other DNA
acatttgttgatacacccataaattgatattgccaaccataagttgatatttttcacaaccatatattgatatctcctctgatcatagtcagaccaacattgctacgacccgtattcgcaccgacac

SEQ ID NO: 1874 - DNA, 127 bp, synthetic construct
  source 1..127: mol_type = other DNA
acatttgttgatacacccataaattgatattgccaaccataagttgatatttttcacaaccataaagtgatatttactctgatcatagtcagaccaacattgctacgacccgtattcgcaccgacac

SEQ ID NO: 1875 - DNA, 127 bp, synthetic construct
  source 1..127: mol_type = other DNA
acatttgttgatacacccataaattgatattgccaaccatatattgatatctctcacaaccataaaatgataattactctgatcatagtcagaccaacattgctacgacccgtattcgcaccgacac

SEQ ID NO: 1876 - DNA, 127 bp, synthetic construct
  source 1..127: mol_type = other DNA
acatttgttgatacacccataaattgatattgccaaccatatattgatatctctcacacccataaattgataattactctgatcatagtcagaccaacattgctacgacccgtattcgcaccgacac

SEQ ID NO: 1877 - DNA, 127 bp, synthetic construct
  source 1..127: mol_type = other DNA
acatttgttgatacacccataaattgatattgccaaccatatattgatatctctcacacccataaattgatattgcctctgatcatagtcagaccaacattgctacgacccgtattcgcaccgacac

SEQ ID NO: 1878 - DNA, 127 bp, synthetic construct
  source 1..127: mol_type = other DNA
acatttgttgatacacccataaattgatattgccaaccatatattgatatctctcacaaccataagttgatattttctctgatcatagtcagaccaacattgctacgacccgtattcgcaccgacac

SEQ ID NO: 1879 - DNA, 127 bp, synthetic construct
  source 1..127: mol_type = other DNA
acatttgttgatacacccataaattgatattgccaaccatatattgatatctctcacaaccatatattgatatctcctctgatcatagtcagaccaacattgctacgacccgtattcgcaccgacac

SEQ ID NO: 1880 - DNA, 127 bp, synthetic construct
  source 1..127: mol_type = other DNA
acatttgttgatacacccataaattgatattgccaaccatatattgatatctctcacaaccataaagtgatatttactctgatcatagtcagaccaacattgctacgacccgtattcgcaccgacac

SEQ ID NO: 1881 - DNA, 127 bp, synthetic construct
  source 1..127: mol_type = other DNA
acatttgttgatacacccataaattgatattgccaaccataaagtgatatttatcacaaccataaaatgataattactctgatcatagtcagaccaacattgctacgacccgtattcgcaccgacac

SEQ ID NO: 1882 - DNA, 127 bp, synthetic construct
  source 1..127: mol_type = other DNA
acatttgttgatacacccataaattgatattgccaaccataaagtgatatttatcacacccataaattgataattactctgatcatagtcagaccaacattgctacgacccgtattcgcaccgacac

SEQ ID NO: 1883 - DNA, 127 bp, synthetic construct
  source 1..127: mol_type = other DNA
acatttgttgatacacccataaattgatattgccaaccataaagtgatatttatcacacccataaattgatattgcctctgatcatagtcagaccaacattgctacgacccgtattcgcaccgacac

SEQ ID NO: 1884 - DNA, 127 bp, synthetic construct
  source 1..127: mol_type = other DNA
acatttgttgatacacccataaattgatattgccaaccataaagtgatatttatcacaaccataagttgatattttctctgatcatagtcagaccaacattgctacgacccgtattcgcaccgacac

SEQ ID NO: 1885 - DNA, 127 bp, synthetic construct
  source 1..127: mol_type = other DNA
acatttgttgatacacccataaattgatattgccaaccataaagtgatatttatcacaaccatatattgatatctcctctgatcatagtcagaccaacattgctacgacccgtattcgcaccgacac

SEQ ID NO: 1886 - DNA, 127 bp, synthetic construct
  source 1..127: mol_type = other DNA
acatttgttgatacacccataaattgatattgccaaccataaagtgatatttatcacaaccataaagtgatatttactctgatcatagtcagaccaacattgctacgacccgtattcgcaccgacac

SEQ ID NO: 1887 - DNA, 127 bp, synthetic construct
  source 1..127: mol_type = other DNA
acatttgttgatacaaccataagttgatattttcaaccataaaatgataattatcacaaccataaaatgataattactctgatcatagtcagaccaacattgctacgacccgtattcgcaccgacac

SEQ ID NO: 1888 - DNA, 127 bp, synthetic construct
  source 1..127: mol_type = other DNA
acatttgttgatacaaccataagttgatattttcaaccataaaatgataattatcacacccataaattgataattactctgatcatagtcagaccaacattgctacgacccgtattcgcaccgacac

SEQ ID NO: 1889 - DNA, 127 bp, synthetic construct
  source 1..127: mol_type = other DNA
acatttgttgatacaaccataagttgatattttcaaccataaaatgataattatcacacccataaattgatattgcctctgatcatagtcagaccaacattgctacgacccgtattcgcaccgacac

SEQ ID NO: 1890 - DNA, 127 bp, synthetic construct
  source 1..127: mol_type = other DNA
acatttgttgatacaaccataagttgatattttcaaccataaaatgataattatcacaaccataagttgatattttctctgatcatagtcagaccaacattgctacgacccgtattcgcaccgacac

SEQ ID NO: 1891 - DNA, 127 bp, synthetic construct
  source 1..127: mol_type = other DNA
acatttgttgatacaaccataagttgatattttcaaccataaaatgataattatcacaaccatatattgatatctcctctgatcatagtcagaccaacattgctacgacccgtattcgcaccgacac

SEQ ID NO: 1892 - DNA, 127 bp, synthetic construct
  source 1..127: mol_type = other DNA
acatttgttgatacaaccataagttgatattttcaaccataaaatgataattatcacaaccataaagtgatatttactctgatcatagtcagaccaacattgctacgacccgtattcgcaccgacac

SEQ ID NO: 1893 - DNA, 127 bp, synthetic construct
  source 1..127: mol_type = other DNA
acatttgttgatacaaccataagttgatattttcacccataaattgataattatcacaaccataaaatgataattactctgatcatagtcagaccaacattgctacgacccgtattcgcaccgacac

SEQ ID NO: 1894 - DNA, 127 bp, synthetic construct
  source 1..127: mol_type = other DNA
acatttgttgatacaaccataagttgatattttcacccataaattgataattatcacacccataaattgataattactctgatcatagtcagaccaacattgctacgacccgtattcgcaccgacac

SEQ ID NO: 1895 - DNA, 127 bp, synthetic construct
  source 1..127: mol_type = other DNA
acatttgttgatacaaccataagttgatattttcacccataaattgataattatcacacccataaattgatattgcctctgatcatagtcagaccaacattgctacgacccgtattcgcaccgacac

SEQ ID NO: 1896 - DNA, 127 bp, synthetic construct
  source 1..127: mol_type = other DNA
acatttgttgatacaaccataagttgatattttcacccataaattgataattatcacaaccataagttgatattttctctgatcatagtcagaccaacattgctacgacccgtattcgcaccgacac

SEQ ID NO: 1897 - DNA, 127 bp, synthetic construct
  source 1..127: mol_type = other DNA
acatttgttgatacaaccataagttgatattttcacccataaattgataattatcacaaccatatattgatatctcctctgatcatagtcagaccaacattgctacgacccgtattcgcaccgacac

SEQ ID NO: 1898 - DNA, 127 bp, synthetic construct
  source 1..127: mol_type = other DNA
acatttgttgatacaaccataagttgatattttcacccataaattgataattatcacaaccataaagtgatatttactctgatcatagtcagaccaacattgctacgacccgtattcgcaccgacac

SEQ ID NO: 1899 - DNA, 127 bp, synthetic construct
  source 1..127: mol_type = other DNA
acatttgttgatacaaccataagttgatattttcacccataaattgatattgctcacaaccataaaatgataattactctgatcatagtcagaccaacattgctacgacccgtattcgcaccgacac

SEQ ID NO: 1900 - DNA, 127 bp, synthetic construct
  source 1..127: mol_type = other DNA
acatttgttgatacaaccataagttgatattttcacccataaattgatattgctcacacccataaattgataattactctgatcatagtcagaccaacattgctacgacccgtattcgcaccgacac

SEQ ID NO: 1901 - DNA, 127 bp, synthetic construct
  source 1..127: mol_type = other DNA
acatttgttgatacaaccataagttgatattttcacccataaattgatattgctcacacccataaattgatattgcctctgatcatagtcagaccaacattgctacgacccgtattcgcaccgacac

SEQ ID NO: 1902 - DNA, 127 bp, synthetic construct
  source 1..127: mol_type = other DNA
acatttgttgatacaaccataagttgatattttcacccataaattgatattgctcacaaccataagttgatattttctctgatcatagtcagaccaacattgctacgacccgtattcgcaccgacac

SEQ ID NO: 1903 - DNA, 127 bp, synthetic construct
  source 1..127: mol_type = other DNA
acatttgttgatacaaccataagttgatattttcacccataaattgatattgctcacaaccatatattgatatctcctctgatcatagtcagaccaacattgctacgacccgtattcgcaccgacac

SEQ ID NO: 1904 - DNA, 127 bp, synthetic construct
  source 1..127: mol_type = other DNA
acatttgttgatacaaccataagttgatattttcacccataaattgatattgctcacaaccataaagtgatatttactctgatcatagtcagaccaacattgctacgacccgtattcgcaccgacac

SEQ ID NO: 1905 - DNA, 127 bp, synthetic construct
  source 1..127: mol_type = other DNA
acatttgttgatacaaccataagttgatattttcaaccataagttgatatttttcacaaccataaaatgataattactctgatcatagtcagaccaacattgctacgacccgtattcgcaccgacac

SEQ ID NO: 1906 - DNA, 127 bp, synthetic construct
  source 1..127: mol_type = other DNA
acatttgttgatacaaccataagttgatattttcaaccataagttgatatttttcacacccataaattgataattactctgatcatagtcagaccaacattgctacgacccgtattcgcaccgacac

SEQ ID NO: 1907 - DNA, 127 bp, synthetic construct
  source 1..127: mol_type = other DNA
acatttgttgatacaaccataagttgatattttcaaccataagttgatatttttcacacccataaattgatattgcctctgatcatagtcagaccaacattgctacgacccgtattcgcaccgacac

SEQ ID NO: 1908 - DNA, 127 bp, synthetic construct
  source 1..127: mol_type = other DNA
acatttgttgatacaaccataagttgatattttcaaccataagttgatatttttcacaaccataagttgatattttctctgatcatagtcagaccaacattgctacgacccgtattcgcaccgacac

SEQ ID NO: 1909 - DNA, 127 bp, synthetic construct
  source 1..127: mol_type = other DNA
acatttgttgatacaaccataagttgatattttcaaccataagttgatatttttcacaaccatatattgatatctcctctgatcatagtcagaccaacattgctacgacccgtattcgcaccgacac

SEQ ID NO: 1910 - DNA, 127 bp, synthetic construct
  source 1..127: mol_type = other DNA
acatttgttgatacaaccataagttgatattttcaaccataagttgatatttttcacaaccataaagtgatatttactctgatcatagtcagaccaacattgctacgacccgtattcgcaccgacac

SEQ ID NO: 1911 - DNA, 127 bp, synthetic construct
  source 1..127: mol_type = other DNA
acatttgttgatacaaccataagttgatattttcaaccatatattgatatctctcacaaccataaaatgataattactctgatcatagtcagaccaacattgctacgacccgtattcgcaccgacac

SEQ ID NO: 1912 - DNA, 127 bp, synthetic construct
  source 1..127: mol_type = other DNA
acatttgttgatacaaccataagttgatattttcaaccatatattgatatctctcacacccataaattgataattactctgatcatagtcagaccaacattgctacgacccgtattcgcaccgacac

SEQ ID NO: 1913 - DNA, 127 bp, synthetic construct
  source 1..127: mol_type = other DNA
acatttgttgatacaaccataagttgatattttcaaccatatattgatatctctcacacccataaattgatattgcctctgatcatagtcagaccaacattgctacgacccgtattcgcaccgacac

SEQ ID NO: 1914 - DNA, 127 bp, synthetic construct
  source 1..127: mol_type = other DNA
acatttgttgatacaaccataagttgatattttcaaccatatattgatatctctcacaaccataagttgatattttctctgatcatagtcagaccaacattgctacgacccgtattcgcaccgacac

SEQ ID NO: 1915 - DNA, 127 bp, synthetic construct
  source 1..127: mol_type = other DNA
acatttgttgatacaaccataagttgatattttcaaccatatattgatatctctcacaaccatatattgatatctcctctgatcatagtcagaccaacattgctacgacccgtattcgcaccgacac

SEQ ID NO: 1916 - DNA, 127 bp, synthetic construct
  source 1..127: mol_type = other DNA
acatttgttgatacaaccataagttgatattttcaaccatatattgatatctctcacaaccataaagtgatatttactctgatcatagtcagaccaacattgctacgacccgtattcgcaccgacac

SEQ ID NO: 1917 - DNA, 127 bp, synthetic construct
  source 1..127: mol_type = other DNA
acatttgttgatacaaccataagttgatattttcaaccataaagtgatatttatcacaaccataaaatgataattactctgatcatagtcagaccaacattgctacgacccgtattcgcaccgacac

SEQ ID NO: 1918 - DNA, 127 bp, synthetic construct
  source 1..127: mol_type = other DNA
acatttgttgatacaaccataagttgatattttcaaccataaagtgatatttatcacacccataaattgataattactctgatcatagtcagaccaacattgctacgacccgtattcgcaccgacac

SEQ ID NO: 1919 - DNA, 127 bp, synthetic construct
  source 1..127: mol_type = other DNA
acatttgttgatacaaccataagttgatattttcaaccataaagtgatatttatcacacccataaattgatattgcctctgatcatagtcagaccaacattgctacgacccgtattcgcaccgacac

SEQ ID NO: 1920 - DNA, 127 bp, synthetic construct
  source 1..127: mol_type = other DNA
acatttgttgatacaaccataagttgatattttcaaccataaagtgatatttatcacaaccataagttgatattttctctgatcatagtcagaccaacattgctacgacccgtattcgcaccgacac

SEQ ID NO: 1921 - DNA, 127 bp, synthetic construct
  source 1..127: mol_type = other DNA
acatttgttgatacaaccataagttgatattttcaaccataaagtgatatttatcacaaccatatattgatatctcctctgatcatagtcagaccaacattgctacgacccgtattcgcaccgacac

SEQ ID NO: 1922 - DNA, 127 bp, synthetic construct
  source 1..127: mol_type = other DNA
acatttgttgatacaaccataagttgatattttcaaccataaagtgatatttatcacaaccataaagtgatatttactctgatcatagtcagaccaacattgctacgacccgtattcgcaccgacac

SEQ ID NO: 1923 - DNA, 127 bp, synthetic construct
  source 1..127: mol_type = other DNA
acatttgttgatacaaccatatattgatatctccaaccataaaatgataattatcacaaccataaaatgataattactctgatcatagtcagaccaacattgctacgacccgtattcgcaccgacac

SEQ ID NO: 1924 - DNA, 127 bp, synthetic construct
  source 1..127: mol_type = other DNA
acatttgttgatacaaccatatattgatatctccaaccataaaatgataattatcacacccataaattgataattactctgatcatagtcagaccaacattgctacgacccgtattcgcaccgacac

SEQ ID NO: 1925 - DNA, 127 bp, synthetic construct
  source 1..127: mol_type = other DNA
acatttgttgatacaaccatatattgatatctccaaccataaaatgataattatcacacccataaattgatattgcctctgatcatagtcagaccaacattgctacgacccgtattcgcaccgacac

SEQ ID NO: 1926 - DNA, 127 bp, synthetic construct
  source 1..127: mol_type = other DNA
acatttgttgatacaaccatatattgatatctccaaccataaaatgataattatcacaaccataagttgatattttctctgatcatagtcagaccaacattgctacgacccgtattcgcaccgacac

SEQ ID NO: 1927 - DNA, 127 bp, synthetic construct
  source 1..127: mol_type = other DNA
acatttgttgatacaaccatatattgatatctccaaccataaaatgataattatcacaaccatatattgatatctcctctgatcatagtcagaccaacattgctacgacccgtattcgcaccgacac

SEQ ID NO: 1928 - DNA, 127 bp, synthetic construct
  source 1..127: mol_type = other DNA
acatttgttgatacaaccatatattgatatctccaaccataaaatgataattatcacaaccataaagtgatatttactctgatcatagtcagaccaacattgctacgacccgtattcgcaccgacac

SEQ ID NO: 1929 - DNA, 127 bp, synthetic construct
  source 1..127: mol_type = other DNA
acatttgttgatacaaccatatattgatatctccacccataaattgataattatcacaaccataaaatgataattactctgatcatagtcagaccaacattgctacgacccgtattcgcaccgacac

SEQ ID NO: 1930 - DNA, 127 bp, synthetic construct
  source 1..127: mol_type = other DNA
acatttgttgatacaaccatatattgatatctccacccataaattgataattatcacacccataaattgataattactctgatcatagtcagaccaacattgctacgacccgtattcgcaccgacac

SEQ ID NO: 1931 - DNA, 127 bp, synthetic construct
  source 1..127: mol_type = other DNA
acatttgttgatacaaccatatattgatatctccacccataaattgataattatcacacccataaattgatattgcctctgatcatagtcagaccaacattgctacgacccgtattcgcaccgacac

SEQ ID NO: 1932 - DNA, 127 bp, synthetic construct
  source 1..127: mol_type = other DNA
acatttgttgatacaaccatatattgatatctccacccataaattgataattatcacaaccataagttgatattttctctgatcatagtcagaccaacattgctacgacccgtattcgcaccgacac

SEQ ID NO: 1933 - DNA, 127 bp, synthetic construct
  source 1..127: mol_type = other DNA
acatttgttgatacaaccatatattgatatctccacccataaattgataattatcacaaccatatattgatatctcctctgatcatagtcagaccaacattgctacgacccgtattcgcaccgacac

SEQ ID NO: 1934 - DNA, 127 bp, synthetic construct
  source 1..127: mol_type = other DNA
acatttgttgatacaaccatatattgatatctccacccataaattgataattatcacaaccataaagtgatatttactctgatcatagtcagaccaacattgctacgacccgtattcgcaccgacac

SEQ ID NO: 1935 - DNA, 127 bp, synthetic construct
  source 1..127: mol_type = other DNA
acatttgttgatacaaccatatattgatatctccacccataaattgatattgctcacaaccataaaatgataattactctgatcatagtcagaccaacattgctacgacccgtattcgcaccgacac

SEQ ID NO: 1936 - DNA, 127 bp, synthetic construct
  source 1..127: mol_type = other DNA
acatttgttgatacaaccatatattgatatctccacccataaattgatattgctcacacccataaattgataattactctgatcatagtcagaccaacattgctacgacccgtattcgcaccgacac

SEQ ID NO: 1937 - DNA, 127 bp, synthetic construct
  source 1..127: mol_type = other DNA
acatttgttgatacaaccatatattgatatctccacccataaattgatattgctcacacccataaattgatattgcctctgatcatagtcagaccaacattgctacgacccgtattcgcaccgacac

SEQ ID NO: 1938 - DNA, 127 bp, synthetic construct
  source 1..127: mol_type = other DNA
acatttgttgatacaaccatatattgatatctccacccataaattgatattgctcacaaccataagttgatattttctctgatcatagtcagaccaacattgctacgacccgtattcgcaccgacac

SEQ ID NO: 1939 - DNA, 127 bp, synthetic construct
  source 1..127: mol_type = other DNA
acatttgttgatacaaccatatattgatatctccacccataaattgatattgctcacaaccatatattgatatctcctctgatcatagtcagaccaacattgctacgacccgtattcgcaccgacac

SEQ ID NO: 1940 - DNA, 127 bp, synthetic construct
  source 1..127: mol_type = other DNA
acatttgttgatacaaccatatattgatatctccacccataaattgatattgctcacaaccataaagtgatatttactctgatcatagtcagaccaacattgctacgacccgtattcgcaccgacac

SEQ ID NO: 1941 - DNA, 127 bp, synthetic construct
  source 1..127: mol_type = other DNA
acatttgttgatacaaccatatattgatatctccaaccataagttgatatttttcacaaccataaaatgataattactctgatcatagtcagaccaacattgctacgacccgtattcgcaccgacac

SEQ ID NO: 1942 - DNA, 127 bp, synthetic construct
  source 1..127: mol_type = other DNA
acatttgttgatacaaccatatattgatatctccaaccataagttgatatttttcacacccataaattgataattactctgatcatagtcagaccaacattgctacgacccgtattcgcaccgacac

SEQ ID NO: 1943 - DNA, 127 bp, synthetic construct
  source 1..127: mol_type = other DNA
acatttgttgatacaaccatatattgatatctccaaccataagttgatatttttcacacccataaattgatattgcctctgatcatagtcagaccaacattgctacgacccgtattcgcaccgacac

SEQ ID NO: 1944 - DNA, 127 bp, synthetic construct
  source 1..127: mol_type = other DNA
acatttgttgatacaaccatatattgatatctccaaccataagttgatatttttcacaaccataagttgatattttctctgatcatagtcagaccaacattgctacgacccgtattcgcaccgacac

SEQ ID NO: 1945 - DNA, 127 bp, synthetic construct
  source 1..127: mol_type = other DNA
acatttgttgatacaaccatatattgatatctccaaccataagttgatatttttcacaaccatatattgatatctcctctgatcatagtcagaccaacattgctacgacccgtattcgcaccgacac

SEQ ID NO: 1946 - DNA, 127 bp, synthetic construct
  source 1..127: mol_type = other DNA
acatttgttgatacaaccatatattgatatctccaaccataagttgatatttttcacaaccataaagtgatatttactctgatcatagtcagaccaacattgctacgacccgtattcgcaccgacac

SEQ ID NO: 1947 - DNA, 127 bp, synthetic construct
  source 1..127: mol_type = other DNA
acatttgttgatacaaccatatattgatatctccaaccatatattgatatctctcacaaccataaaatgataattactctgatcatagtcagaccaacattgctacgacccgtattcgcaccgacac

SEQ ID NO: 1948 - DNA, 127 bp, synthetic construct
  source 1..127: mol_type = other DNA
acatttgttgatacaaccatatattgatatctccaaccatatattgatatctctcacacccataaattgataattactctgatcatagtcagaccaacattgctacgacccgtattcgcaccgacac

SEQ ID NO: 1949 - DNA, 127 bp, synthetic construct
  source 1..127: mol_type = other DNA
acatttgttgatacaaccatatattgatatctccaaccatatattgatatctctcacacccataaattgatattgcctctgatcatagtcagaccaacattgctacgacccgtattcgcaccgacac

SEQ ID NO: 1950 - DNA, 127 bp, synthetic construct
  source 1..127: mol_type = other DNA
acatttgttgatacaaccatatattgatatctccaaccatatattgatatctctcacaaccataagttgatattttctctgatcatagtcagaccaacattgctacgacccgtattcgcaccgacac

SEQ ID NO: 1951 - DNA, 127 bp, synthetic construct
  source 1..127: mol_type = other DNA
acatttgttgatacaaccatatattgatatctccaaccatatattgatatctctcacaaccatatattgatatctcctctgatcatagtcagaccaacattgctacgacccgtattcgcaccgacac

SEQ ID NO: 1952 - DNA, 127 bp, synthetic construct
  source 1..127: mol_type = other DNA
acatttgttgatacaaccatatattgatatctccaaccatatattgatatctctcacaaccataaagtgatatttactctgatcatagtcagaccaacattgctacgacccgtattcgcaccgacac

SEQ ID NO: 1953 - DNA, 127 bp, synthetic construct
  source 1..127: mol_type = other DNA
acatttgttgatacaaccatatattgatatctccaaccataaagtgatatttatcacaaccataaaatgataattactctgatcatagtcagaccaacattgctacgacccgtattcgcaccgacac

SEQ ID NO: 1954 - DNA, 127 bp, synthetic construct
  source 1..127: mol_type = other DNA
acatttgttgatacaaccatatattgatatctccaaccataaagtgatatttatcacacccataaattgataattactctgatcatagtcagaccaacattgctacgacccgtattcgcaccgacac

SEQ ID NO: 1955 - DNA, 127 bp, synthetic construct
  source 1..127: mol_type = other DNA
acatttgttgatacaaccatatattgatatctccaaccataaagtgatatttatcacacccataaattgatattgcctctgatcatagtcagaccaacattgctacgacccgtattcgcaccgacac

SEQ ID NO: 1956 - DNA, 127 bp, synthetic construct
  source 1..127: mol_type = other DNA
acatttgttgatacaaccatatattgatatctccaaccataaagtgatatttatcacaaccataagttgatattttctctgatcatagtcagaccaacattgctacgacccgtattcgcaccgacac

SEQ ID NO: 1957 - DNA, 127 bp, synthetic construct
  source 1..127: mol_type = other DNA
acatttgttgatacaaccatatattgatatctccaaccataaagtgatatttatcacaaccatatattgatatctcctctgatcatagtcagaccaacattgctacgacccgtattcgcaccgacac

SEQ ID NO: 1958 - DNA, 127 bp, synthetic construct
  source 1..127: mol_type = other DNA
acatttgttgatacaaccatatattgatatctccaaccataaagtgatatttatcacaaccataaagtgatatttactctgatcatagtcagaccaacattgctacgacccgtattcgcaccgacac

SEQ ID NO: 1959 - DNA, 127 bp, synthetic construct
  source 1..127: mol_type = other DNA
acatttgttgatacaaccataaagtgatatttacaaccataaaatgataattatcacaaccataaaatgataattactctgatcatagtcagaccaacattgctacgacccgtattcgcaccgacac

SEQ ID NO: 1960 - DNA, 127 bp, synthetic construct
  source 1..127: mol_type = other DNA
acatttgttgatacaaccataaagtgatatttacaaccataaaatgataattatcacacccataaattgataattactctgatcatagtcagaccaacattgctacgacccgtattcgcaccgacac

SEQ ID NO: 1961 - DNA, 127 bp, synthetic construct
  source 1..127: mol_type = other DNA
acatttgttgatacaaccataaagtgatatttacaaccataaaatgataattatcacacccataaattgatattgcctctgatcatagtcagaccaacattgctacgacccgtattcgcaccgacac

SEQ ID NO: 1962 - DNA, 127 bp, synthetic construct
  source 1..127: mol_type = other DNA
acatttgttgatacaaccataaagtgatatttacaaccataaaatgataattatcacaaccataagttgatattttctctgatcatagtcagaccaacattgctacgacccgtattcgcaccgacac

SEQ ID NO: 1963 - DNA, 127 bp, synthetic construct
  source 1..127: mol_type = other DNA
acatttgttgatacaaccataaagtgatatttacaaccataaaatgataattatcacaaccatatattgatatctcctctgatcatagtcagaccaacattgctacgacccgtattcgcaccgacac

SEQ ID NO: 1964 - DNA, 127 bp, synthetic construct
  source 1..127: mol_type = other DNA
acatttgttgatacaaccataaagtgatatttacaaccataaaatgataattatcacaaccataaagtgatatttactctgatcatagtcagaccaacattgctacgacccgtattcgcaccgacac

SEQ ID NO: 1965 - DNA, 127 bp, synthetic construct
  source 1..127: mol_type = other DNA
acatttgttgatacaaccataaagtgatatttacacccataaattgataattatcacaaccataaaatgataattactctgatcatagtcagaccaacattgctacgacccgtattcgcaccgacac

SEQ ID NO: 1966 - DNA, 127 bp, synthetic construct
  source 1..127: mol_type = other DNA
acatttgttgatacaaccataaagtgatatttacacccataaattgataattatcacacccataaattgataattactctgatcatagtcagaccaacattgctacgacccgtattcgcaccgacac

SEQ ID NO: 1967 - DNA, 127 bp, synthetic construct
  source 1..127: mol_type = other DNA
acatttgttgatacaaccataaagtgatatttacacccataaattgataattatcacacccataaattgatattgcctctgatcatagtcagaccaacattgctacgacccgtattcgcaccgacac

SEQ ID NO: 1968 - DNA, 127 bp, synthetic construct
  source 1..127: mol_type = other DNA
acatttgttgatacaaccataaagtgatatttacacccataaattgataattatcacaaccataagttgatattttctctgatcatagtcagaccaacattgctacgacccgtattcgcaccgacac

SEQ ID NO: 1969 - DNA, 127 bp, synthetic construct
  source 1..127: mol_type = other DNA
acatttgttgatacaaccataaagtgatatttacacccataaattgataattatcacaaccatatattgatatctcctctgatcatagtcagaccaacattgctacgacccgtattcgcaccgacac

SEQ ID NO: 1970 - DNA, 127 bp, synthetic construct
  source 1..127: mol_type = other DNA
acatttgttgatacaaccataaagtgatatttacacccataaattgataattatcacaaccataaagtgatatttactctgatcatagtcagaccaacattgctacgacccgtattcgcaccgacac

SEQ ID NO: 1971 - DNA, 127 bp, synthetic construct
  source 1..127: mol_type = other DNA
acatttgttgatacaaccataaagtgatatttacacccataaattgatattgctcacaaccataaaatgataattactctgatcatagtcagaccaacattgctacgacccgtattcgcaccgacac

SEQ ID NO: 1972 - DNA, 127 bp, synthetic construct
  source 1..127: mol_type = other DNA
acatttgttgatacaaccataaagtgatatttacacccataaattgatattgctcacacccataaattgataattactctgatcatagtcagaccaacattgctacgacccgtattcgcaccgacac

SEQ ID NO: 1973 - DNA, 127 bp, synthetic construct
  source 1..127: mol_type = other DNA
acatttgttgatacaaccataaagtgatatttacacccataaattgatattgctcacacccataaattgatattgcctctgatcatagtcagaccaacattgctacgacccgtattcgcaccgacac

SEQ ID NO: 1974 - DNA, 127 bp, synthetic construct
  source 1..127: mol_type = other DNA
acatttgttgatacaaccataaagtgatatttacacccataaattgatattgctcacaaccataagttgatattttctctgatcatagtcagaccaacattgctacgacccgtattcgcaccgacac

SEQ ID NO: 1975 - DNA, 127 bp, synthetic construct
  source 1..127: mol_type = other DNA
acatttgttgatacaaccataaagtgatatttacacccataaattgatattgctcacaaccatatattgatatctcctctgatcatagtcagaccaacattgctacgacccgtattcgcaccgacac

SEQ ID NO: 1976 - DNA, 127 bp, synthetic construct
  source 1..127: mol_type = other DNA
acatttgttgatacaaccataaagtgatatttacacccataaattgatattgctcacaaccataaagtgatatttactctgatcatagtcagaccaacattgctacgacccgtattcgcaccgacac

SEQ ID NO: 1977 - DNA, 127 bp, synthetic construct
  source 1..127: mol_type = other DNA
acatttgttgatacaaccataaagtgatatttacaaccataagttgatatttttcacaaccataaaatgataattactctgatcatagtcagaccaacattgctacgacccgtattcgcaccgacac

SEQ ID NO: 1978 - DNA, 127 bp, synthetic construct
  source 1..127: mol_type = other DNA
acatttgttgatacaaccataaagtgatatttacaaccataagttgatatttttcacacccataaattgataattactctgatcatagtcagaccaacattgctacgacccgtattcgcaccgacac

SEQ ID NO: 1979 - DNA, 127 bp, synthetic construct
  source 1..127: mol_type = other DNA
acatttgttgatacaaccataaagtgatatttacaaccataagttgatatttttcacacccataaattgatattgcctctgatcatagtcagaccaacattgctacgacccgtattcgcaccgacac

SEQ ID NO: 1980 - DNA, 127 bp, synthetic construct
  source 1..127: mol_type = other DNA
acatttgttgatacaaccataaagtgatatttacaaccataagttgatatttttcacaaccataagttgatattttctctgatcatagtcagaccaacattgctacgacccgtattcgcaccgacac

SEQ ID NO: 1981 - DNA, 127 bp, synthetic construct
  source 1..127: mol_type = other DNA
acatttgttgatacaaccataaagtgatatttacaaccataagttgatatttttcacaaccatatattgatatctcctctgatcatagtcagaccaacattgctacgacccgtattcgcaccgacac

SEQ ID NO: 1982 - DNA, 127 bp, synthetic construct
  source 1..127: mol_type = other DNA
acatttgttgatacaaccataaagtgatatttacaaccataagttgatatttttcacaaccataaagtgatatttactctgatcatagtcagaccaacattgctacgacccgtattcgcaccgacac

SEQ ID NO: 1983 - DNA, 127 bp, synthetic construct
  source 1..127: mol_type = other DNA
acatttgttgatacaaccataaagtgatatttacaaccatatattgatatctctcacaaccataaaatgataattactctgatcatagtcagaccaacattgctacgacccgtattcgcaccgacac

SEQ ID NO: 1984 - DNA, 127 bp, synthetic construct
  source 1..127: mol_type = other DNA
acatttgttgatacaaccataaagtgatatttacaaccatatattgatatctctcacacccataaattgataattactctgatcatagtcagaccaacattgctacgacccgtattcgcaccgacac

SEQ ID NO: 1985 - DNA, 127 bp, synthetic construct
  source 1..127: mol_type = other DNA
acatttgttgatacaaccataaagtgatatttacaaccatatattgatatctctcacacccataaattgatattgcctctgatcatagtcagaccaacattgctacgacccgtattcgcaccgacac

SEQ ID NO: 1986 - DNA, 127 bp, synthetic construct
  source 1..127: mol_type = other DNA
acatttgttgatacaaccataaagtgatatttacaaccatatattgatatctctcacaaccataagttgatattttctctgatcatagtcagaccaacattgctacgacccgtattcgcaccgacac

SEQ ID NO: 1987 - DNA, 127 bp, synthetic construct
  source 1..127: mol_type = other DNA
acatttgttgatacaaccataaagtgatatttacaaccatatattgatatctctcacaaccatatattgatatctcctctgatcatagtcagaccaacattgctacgacccgtattcgcaccgacac

SEQ ID NO: 1988 - DNA, 127 bp, synthetic construct
  source 1..127: mol_type = other DNA
acatttgttgatacaaccataaagtgatatttacaaccatatattgatatctctcacaaccataaagtgatatttactctgatcatagtcagaccaacattgctacgacccgtattcgcaccgacac

SEQ ID NO: 1989 - DNA, 127 bp, synthetic construct
  source 1..127: mol_type = other DNA
acatttgttgatacaaccataaagtgatatttacaaccataaagtgatatttatcacaaccataaaatgataattactctgatcatagtcagaccaacattgctacgacccgtattcgcaccgacac

SEQ ID NO: 1990 - DNA, 127 bp, synthetic construct
  source 1..127: mol_type = other DNA
acatttgttgatacaaccataaagtgatatttacaaccataaagtgatatttatcacacccataaattgataattactctgatcatagtcagaccaacattgctacgacccgtattcgcaccgacac

SEQ ID NO: 1991 - DNA, 127 bp, synthetic construct
  source 1..127: mol_type = other DNA
acatttgttgatacaaccataaagtgatatttacaaccataaagtgatatttatcacacccataaattgatattgcctctgatcatagtcagaccaacattgctacgacccgtattcgcaccgacac

SEQ ID NO: 1992 - DNA, 127 bp, synthetic construct
  source 1..127: mol_type = other DNA
acatttgttgatacaaccataaagtgatatttacaaccataaagtgatatttatcacaaccataagttgatattttctctgatcatagtcagaccaacattgctacgacccgtattcgcaccgacac

SEQ ID NO: 1993 - DNA, 127 bp, synthetic construct
  source 1..127: mol_type = other DNA
acatttgttgatacaaccataaagtgatatttacaaccataaagtgatatttatcacaaccatatattgatatctcctctgatcatagtcagaccaacattgctacgacccgtattcgcaccgacac

SEQ ID NO: 1994 - DNA, 127 bp, synthetic construct
  source 1..127: mol_type = other DNA
acatttgttgatacaaccataaagtgatatttacaaccataaagtgatatttatcacaaccataaagtgatatttactctgatcatagtcagaccaacattgctacgacccgtattcgcaccgacac

SEQ ID NO: 1995 - DNA, 127 bp, synthetic construct
  source 1..127: mol_type = other DNA
acatttgttgataaccaacgccccgtcgccggccacccataaattgataattatcacacccataaattgatattgcctctgatcatagtcagaccaacattgctacgacccgtattcgcaccgacac

SEQ ID NO: 1996 - DNA, 127 bp, synthetic construct
  source 1..127: mol_type = other DNA
acatttgttgatacaaccataaaatgataattaacaaacgcccggtcgccggctcacacccataaattgatattgcctctgatcatagtcagaccaacattgctacgacccgtattcgcaccgacac

SEQ ID NO: 1997 - DNA, 127 bp, synthetic construct
  source 1..127: mol_type = other DNA
acatttgttgataaccaacgccccgtcgccggcacaaacgcccggtcgccggctcacacccataaattgatattgcctctgatcatagtcagaccaacattgctacgacccgtattcgcaccgacac

SEQ ID NO: 1998 - DNA, 127 bp, synthetic construct
  source 1..127: mol_type = other DNA
acatttgttgataaccaacgccccgtcgccggccacccataaattgataattatcaacaaacgcccggtcgcggtactctgatcatagtcagaccaacattgctacgacccgtattcgcaccgacac

SEQ ID NO: 1999 - DNA, 127 bp, synthetic construct
  source 1..127: mol_type = other DNA
acatttgttgatacaaccataaaatgataattaacaaacgcccggtcgccggctcaacaaacgcccggtcgcggtactctgatcatagtcagaccaacattgctacgacccgtattcgcaccgacac

SEQ ID NO: 2000 - DNA, 127 bp, synthetic construct
  source 1..127: mol_type = other DNA
acatttgttgataaccaacgccccgtcgccggcacaaacgcccggtcgccggctcaacaaacgcccggtcgcggtactctgatcatagtcagaccaacattgctacgacccgtattcgcaccgacac

SEQ ID NO: 2001 - DNA, 127 bp, synthetic construct
  source 1..127: mol_type = other DNA
acatttgttgatagttggtattttactattaatcacccataaattgataattatcacacccataaattgatattgcctctgatcatagtcagaccaacattgctacgacccgtattcgcaccgacac

SEQ ID NO: 2002 - DNA, 127 bp, synthetic construct
  source 1..127: mol_type = other DNA
acatttgttgatacaaccataaaatgataattagtgggtatttaactattaattcacacccataaattgatattgcctctgatcatagtcagaccaacattgctacgacccgtattcgcaccgacac

SEQ ID NO: 2003 - DNA, 127 bp, synthetic construct
  source 1..127: mol_type = other DNA
acatttgttgatagttggtattttactattaatgtgggtatttaactattaattcacacccataaattgatattgcctctgatcatagtcagaccaacattgctacgacccgtattcgcaccgacac

SEQ ID NO: 2004 - DNA, 127 bp, synthetic construct
  source 1..127: mol_type = other DNA
acatttgttgatacaaccataaaatgataattagtgggtatttaactattaattcagtgggtatttaactataacgctctgatcatagtcagaccaacattgctacgacccgtattcgcaccgacac

SEQ ID NO: 2005 - DNA, 127 bp, synthetic construct
  source 1..127: mol_type = other DNA
acatttgttgatagttggtattttactattaatcacccataaattgataattatcagtgggtatttaactataacgctctgatcatagtcagaccaacattgctacgacccgtattcgcaccgacac

SEQ ID NO: 2006 - DNA, 127 bp, synthetic construct
  source 1..127: mol_type = other DNA
acatttgttgatagttggtattttactattaatgtgggtatttaactattaattcagtgggtatttaactataacgctctgatcatagtcagaccaacattgctacgacccgtattcgcaccgacac

SEQ ID NO: 2007 - DNA, 127 bp, synthetic construct
  source 1..127: mol_type = other DNA
acatttgttgatacaaccataaaatgataattacaaccataaaatgataattatcagtgggtatttaactataacgctctgatcatagtcagaccaacattgctacgacccgtattcgcaccgacac

SEQ ID NO: 2008 - DNA, 127 bp, synthetic construct
  source 1..127: mol_type = other DNA
acatttgttgatacaaccataaaatgataattacacccataaattgatattgctcagtgggtatttaactataacgctctgatcatagtcagaccaacattgctacgacccgtattcgcaccgacac

SEQ ID NO: 2009 - DNA, 127 bp, synthetic construct
  source 1..127: mol_type = other DNA
acatttgttgatacaaccataaaatgataattacaaccataagttgatatttttcagtgggtatttaactataacgctctgatcatagtcagaccaacattgctacgacccgtattcgcaccgacac

SEQ ID NO: 2010 - DNA, 127 bp, synthetic construct
  source 1..127: mol_type = other DNA
acatttgttgatacaaccataaaatgataattacaaccatatattgatatctctcagtgggtatttaactataacgctctgatcatagtcagaccaacattgctacgacccgtattcgcaccgacac

SEQ ID NO: 2011 - DNA, 127 bp, synthetic construct
  source 1..127: mol_type = other DNA
acatttgttgatacaaccataaaatgataattacaaccataaagtgatatttatcagtgggtatttaactataacgctctgatcatagtcagaccaacattgctacgacccgtattcgcaccgacac

SEQ ID NO: 2012 - DNA, 127 bp, synthetic construct
  source 1..127: mol_type = other DNA
acatttgttgatacacccataaattgataattacaaccataaaatgataattatcagtgggtatttaactataacgctctgatcatagtcagaccaacattgctacgacccgtattcgcaccgacac

SEQ ID NO: 2013 - DNA, 127 bp, synthetic construct
  source 1..127: mol_type = other DNA
acatttgttgatacacccataaattgataattacacccataaattgataattatcagtgggtatttaactataacgctctgatcatagtcagaccaacattgctacgacccgtattcgcaccgacac

SEQ ID NO: 2014 - DNA, 127 bp, synthetic construct
  source 1..127: mol_type = other DNA
acatttgttgatacacccataaattgataattacacccataaattgatattgctcagtgggtatttaactataacgctctgatcatagtcagaccaacattgctacgacccgtattcgcaccgacac

SEQ ID NO: 2015 - DNA, 127 bp, synthetic construct
  source 1..127: mol_type = other DNA
acatttgttgatacacccataaattgataattacaaccataagttgatatttttcagtgggtatttaactataacgctctgatcatagtcagaccaacattgctacgacccgtattcgcaccgacac

SEQ ID NO: 2016 - DNA, 127 bp, synthetic construct
  source 1..127: mol_type = other DNA
acatttgttgatacacccataaattgataattacaaccatatattgatatctctcagtgggtatttaactataacgctctgatcatagtcagaccaacattgctacgacccgtattcgcaccgacac

SEQ ID NO: 2017 - DNA, 127 bp, synthetic construct
  source 1..127: mol_type = other DNA
acatttgttgatacacccataaattgataattacaaccataaagtgatatttatcagtgggtatttaactataacgctctgatcatagtcagaccaacattgctacgacccgtattcgcaccgacac

SEQ ID NO: 2018 - DNA, 127 bp, synthetic construct
  source 1..127: mol_type = other DNA
acatttgttgatacacccataaattgatattgccaaccataaaatgataattatcagtgggtatttaactataacgctctgatcatagtcagaccaacattgctacgacccgtattcgcaccgacac

SEQ ID NO: 2019 - DNA, 127 bp, synthetic construct
  source 1..127: mol_type = other DNA
acatttgttgatacacccataaattgatattgccacccataaattgataattatcagtgggtatttaactataacgctctgatcatagtcagaccaacattgctacgacccgtattcgcaccgacac

SEQ ID NO: 2020 - DNA, 127 bp, synthetic construct
  source 1..127: mol_type = other DNA
acatttgttgatacacccataaattgatattgccacccataaattgatattgctcagtgggtatttaactataacgctctgatcatagtcagaccaacattgctacgacccgtattcgcaccgacac

SEQ ID NO: 2021 - DNA, 127 bp, synthetic construct
  source 1..127: mol_type = other DNA
acatttgttgatacacccataaattgatattgccaaccataagttgatatttttcagtgggtatttaactataacgctctgatcatagtcagaccaacattgctacgacccgtattcgcaccgacac

SEQ ID NO: 2022 - DNA, 127 bp, synthetic construct
  source 1..127: mol_type = other DNA
acatttgttgatacacccataaattgatattgccaaccatatattgatatctctcagtgggtatttaactataacgctctgatcatagtcagaccaacattgctacgacccgtattcgcaccgacac

SEQ ID NO: 2023 - DNA, 127 bp, synthetic construct
  source 1..127: mol_type = other DNA
acatttgttgatacacccataaattgatattgccaaccataaagtgatatttatcagtgggtatttaactataacgctctgatcatagtcagaccaacattgctacgacccgtattcgcaccgacac

SEQ ID NO: 2024 - DNA, 127 bp, synthetic construct
  source 1..127: mol_type = other DNA
acatttgttgatacaaccataagttgatattttcaaccataaaatgataattatcagtgggtatttaactataacgctctgatcatagtcagaccaacattgctacgacccgtattcgcaccgacac

SEQ ID NO: 2025 - DNA, 127 bp, synthetic construct
  source 1..127: mol_type = other DNA
acatttgttgatacaaccataagttgatattttcacccataaattgataattatcagtgggtatttaactataacgctctgatcatagtcagaccaacattgctacgacccgtattcgcaccgacac

SEQ ID NO: 2026 - DNA, 127 bp, synthetic construct
  source 1..127: mol_type = other DNA
acatttgttgatacaaccataagttgatattttcacccataaattgatattgctcagtgggtatttaactataacgctctgatcatagtcagaccaacattgctacgacccgtattcgcaccgacac

SEQ ID NO: 2027 - DNA, 127 bp, synthetic construct
  source 1..127: mol_type = other DNA
acatttgttgatacaaccataagttgatattttcaaccataagttgatatttttcagtgggtatttaactataacgctctgatcatagtcagaccaacattgctacgacccgtattcgcaccgacac

SEQ ID NO: 2028 - DNA, 127 bp, synthetic construct
  source 1..127: mol_type = other DNA
acatttgttgatacaaccataagttgatattttcaaccatatattgatatctctcagtgggtatttaactataacgctctgatcatagtcagaccaacattgctacgacccgtattcgcaccgacac

SEQ ID NO: 2029 - DNA, 127 bp, synthetic construct
  source 1..127: mol_type = other DNA
acatttgttgatacaaccataagttgatattttcaaccataaagtgatatttatcagtgggtatttaactataacgctctgatcatagtcagaccaacattgctacgacccgtattcgcaccgacac

SEQ ID NO: 2030 - DNA, 127 bp, synthetic construct
  source 1..127: mol_type = other DNA
acatttgttgatacaaccatatattgatatctccaaccataaaatgataattatcagtgggtatttaactataacgctctgatcatagtcagaccaacattgctacgacccgtattcgcaccgacac

SEQ ID NO: 2031 - DNA, 127 bp, synthetic construct
  source 1..127: mol_type = other DNA
acatttgttgatacaaccatatattgatatctccacccataaattgataattatcagtgggtatttaactataacgctctgatcatagtcagaccaacattgctacgacccgtattcgcaccgacac

SEQ ID NO: 2032 - DNA, 127 bp, synthetic construct
  source 1..127: mol_type = other DNA
acatttgttgatacaaccatatattgatatctccacccataaattgatattgctcagtgggtatttaactataacgctctgatcatagtcagaccaacattgctacgacccgtattcgcaccgacac

SEQ ID NO: 2033 - DNA, 127 bp, synthetic construct
  source 1..127: mol_type = other DNA
acatttgttgatacaaccatatattgatatctccaaccataagttgatatttttcagtgggtatttaactataacgctctgatcatagtcagaccaacattgctacgacccgtattcgcaccgacac

SEQ ID NO: 2034 - DNA, 127 bp, synthetic construct
  source 1..127: mol_type = other DNA
acatttgttgatacaaccatatattgatatctccaaccatatattgatatctctcagtgggtatttaactataacgctctgatcatagtcagaccaacattgctacgacccgtattcgcaccgacac

SEQ ID NO: 2035 - DNA, 127 bp, synthetic construct
  source 1..127: mol_type = other DNA
acatttgttgatacaaccatatattgatatctccaaccataaagtgatatttatcagtgggtatttaactataacgctctgatcatagtcagaccaacattgctacgacccgtattcgcaccgacac

SEQ ID NO: 2036 - DNA, 127 bp, synthetic construct
  source 1..127: mol_type = other DNA
acatttgttgatacaaccataaagtgatatttacaaccataaaatgataattatcagtgggtatttaactataacgctctgatcatagtcagaccaacattgctacgacccgtattcgcaccgacac

SEQ ID NO: 2037 - DNA, 127 bp, synthetic construct
  source 1..127: mol_type = other DNA
acatttgttgatacaaccataaagtgatatttacacccataaattgataattatcagtgggtatttaactataacgctctgatcatagtcagaccaacattgctacgacccgtattcgcaccgacac

SEQ ID NO: 2038 - DNA, 127 bp, synthetic construct
  source 1..127: mol_type = other DNA
acatttgttgatacaaccataaagtgatatttacacccataaattgatattgctcagtgggtatttaactataacgctctgatcatagtcagaccaacattgctacgacccgtattcgcaccgacac

SEQ ID NO: 2039 - DNA, 127 bp, synthetic construct
  source 1..127: mol_type = other DNA
acatttgttgatacaaccataaagtgatatttacaaccataagttgatatttttcagtgggtatttaactataacgctctgatcatagtcagaccaacattgctacgacccgtattcgcaccgacac

SEQ ID NO: 2040 - DNA, 127 bp, synthetic construct
  source 1..127: mol_type = other DNA
acatttgttgatacaaccataaagtgatatttacaaccatatattgatatctctcagtgggtatttaactataacgctctgatcatagtcagaccaacattgctacgacccgtattcgcaccgacac

SEQ ID NO: 2041 - DNA, 127 bp, synthetic construct
  source 1..127: mol_type = other DNA
acatttgttgatacaaccataaagtgatatttacaaccataaagtgatatttatcagtgggtatttaactataacgctctgatcatagtcagaccaacattgctacgacccgtattcgcaccgacac

SEQ ID NO: 2042 - DNA, 127 bp, synthetic construct
  source 1..127: mol_type = other DNA
acatttgttgatacaaccataaaatgataattacaaccataaaatgataattatcataattatcattttatggttgctctgatcatagtcagaccaacattgctacgacccgtattcgcaccgacac

SEQ ID NO: 2043 - DNA, 127 bp, synthetic construct
  source 1..127: mol_type = other DNA
acatttgttgatacaaccataaaatgataattataattatcattttatggttgtcacaaccataaaatgataattactctgatcatagtcagaccaacattgctacgacccgtattcgcaccgacac

SEQ ID NO: 2044 - DNA, 127 bp, synthetic construct
  source 1..127: mol_type = other DNA
acatttgttgatataattatcattttatggttgcaaccataaaatgataattatcacaaccataaaatgataattactctgatcatagtcagaccaacattgctacgacccgtattcgcaccgacac

SEQ ID NO: 2045 - DNA, 127 bp, synthetic construct
  source 1..127: mol_type = other DNA
acatttgttgatacaaccataaaatgataattataattatcattttatggttgtcataattatcattttatggttgctctgatcatagtcagaccaacattgctacgacccgtattcgcaccgacac

SEQ ID NO: 2046 - DNA, 127 bp, synthetic construct
  source 1..127: mol_type = other DNA
acatttgttgatataattatcattttatggttgtaattatcattttatggttgtcacaaccataaaatgataattactctgatcatagtcagaccaacattgctacgacccgtattcgcaccgacac

SEQ ID NO: 2047 - DNA, 127 bp, synthetic construct
  source 1..127: mol_type = other DNA
acatttgttgatataattatcattttatggttgcaaccataaaatgataattatcataattatcattttatggttgctctgatcatagtcagaccaacattgctacgacccgtattcgcaccgacac

SEQ ID NO: 2048 - DNA, 127 bp, synthetic construct
  source 1..127: mol_type = other DNA
acatttgttgatataattatcattttatggttgtaattatcattttatggttgtcataattatcattttatggttgctctgatcatagtcagaccaacattgctacgacccgtattcgcaccgacac

SEQ ID NO: 2049 - DNA, 127 bp, synthetic construct
  source 1..127: mol_type = other DNA
acatttgttgatacaaccataaaatgataattacaaccataaaatgataattatgataattatcattttatggttgctctgatcatagtcagaccaacattgctacgacccgtattcgcaccgacac

SEQ ID NO: 2050 - DNA, 127 bp, synthetic construct
  source 1..127: mol_type = other DNA
acatttgttgatataattatcattttatggttgcaaccataaaatgataattatgataattatcattttatggttgctctgatcatagtcagaccaacattgctacgacccgtattcgcaccgacac

SEQ ID NO: 2051 - DNA, 127 bp, synthetic construct
  source 1..127: mol_type = other DNA
acatttgttgatacaaccataaaatgataattacacccataaattgataattatcacacccaatttaactataacgctctgatcatagtcagaccaacattgctacgacccgtattcgcaccgacac

SEQ ID NO: 2052 - DNA, 127 bp, synthetic construct; identical to SEQ ID NO: 2051
  source 1..127: mol_type = other DNA

SEQ ID NO: 2053 - DNA, 127 bp, synthetic construct; identical to SEQ ID NO: 2051
  source 1..127: mol_type = other DNA

SEQ ID NO: 2054 - DNA, 127 bp, synthetic construct; identical to SEQ ID NO: 2051
  source 1..127: mol_type = other DNA

SEQ ID NO: 2055 - DNA, 127 bp, synthetic construct
  source 1..127: mol_type = other DNA
acatttgtcgatacaaccataaaatgataattacacccataaattgataattatcacacccaatttaactataacgctctgatcatagtcagaccaacattgctacgacccgtattcgcaccgacac

SEQ ID NO: 2056 - DNA, 127 bp, synthetic construct
  source 1..127: mol_type = other DNA
acatttgtggatacaaccataaaatgataattacacccataaattgataattatcacacccaatttaactataacgctctgatcatagtcagaccaacattgctacgacccgtattcgcaccgacac

SEQ ID NO: 2057 - DNA, 127 bp, synthetic construct
  source 1..127: mol_type = other DNA
acatttgttcatacaaccataaaatgataattacacccataaattgataattatcacacccaatttaactataacgctctgatcatagtcagaccaacattgctacgacccgtattcgcaccgacac

SEQ ID NO: 2058 - DNA, 127 bp, synthetic construct
  source 1..127: mol_type = other DNA
acatttgttgatacaaccataaaatgataattacacccataaatggataattatcacacccaatttaactataacgctctgatcatagtcagaccaacattgctacgacccgtattcgcaccgacac

SEQ ID NO: 2059 - DNA, 127 bp, synthetic construct
  source 1..127: mol_type = other DNA
acatttgttgatacaaccataaaatgataattacacccataaattcataattatcacacccaatttaactataacgctctgatcatagtcagaccaacattgctacgacccgtattcgcaccgacac

SEQ ID NO: 2060 - DNA, 127 bp, synthetic construct
  source 1..127: mol_type = other DNA
acatttgtcgatacaaccataaaatgataattacacccataaatggataattatcacacccaatttaactataacgctctgatcatagtcagaccaacattgctacgacccgtattcgcaccgacac

SEQ ID NO: 2061 - DNA, 127 bp, synthetic construct
  source 1..127: mol_type = other DNA
acatttgtcgatacaaccataaaatgataattacacccataaattcataattatcacacccaatttaactataacgctctgatcatagtcagaccaacattgctacgacccgtattcgcaccgacac

SEQ ID NO: 2062 - DNA, 127 bp, synthetic construct
  source 1..127: mol_type = other DNA
acatttgtggatacaaccataaaatgataattacacccataaatggataattatcacacccaatttaactataacgctctgatcatagtcagaccaacattgctacgacccgtattcgcaccgacac

SEQ ID NO: 2063 - DNA, 127 bp, synthetic construct
  source 1..127: mol_type = other DNA
acatttgtggatacaaccataaaatgataattacacccataaattcataattatcacacccaatttaactataacgctctgatcatagtcagaccaacattgctacgacccgtattcgcaccgacac

SEQ ID NO: 2064 - DNA, 127 bp, synthetic construct
  source 1..127: mol_type = other DNA
acatttgttcatacaaccataaaatgataattacacccataaatggataattatcacacccaatttaactataacgctctgatcatagtcagaccaacattgctacgacccgtattcgcaccgacac

SEQ ID NO: 2065 - DNA, 127 bp, synthetic construct
  source 1..127: mol_type = other DNA
acatttgttcatacaaccataaaatgataattacacccataaattcataattatcacacccaatttaactataacgctctgatcatagtcagaccaacattgctacgacccgtattcgcaccgacac

SEQ ID NO: 2066 - DNA, 127 bp, synthetic construct
  source 1..127: mol_type = other DNA
acatttgttgatacaaccataaaatgataattacacccataaattgatcattatcacacccaatttaactataacgctctgatcatagtcagaccaacattgctacgacccgtattcgcaccgacac

SEQ ID NO: 2067 - DNA, 127 bp, synthetic construct
  source 1..127: mol_type = other DNA
acatttgtcgatacaaccataaaatgataattacacccataaattgatcattatcacacccaatttaactataacgctctgatcatagtcagaccaacattgctacgacccgtattcgcaccgacac

SEQ ID NO: 2068 - DNA, 127 bp, synthetic construct
  source 1..127: mol_type = other DNA
acatttgtggatacaaccataaaatgataattacacccataaattgatcattatcacacccaatttaactataacgctctgatcatagtcagaccaacattgctacgacccgtattcgcaccgacac

SEQ ID NO: 2069 - DNA, 127 bp, synthetic construct
  source 1..127: mol_type = other DNA
acatttgttcatacaaccataaaatgataattacacccataaattgatcattatcacacccaatttaactataacgctctgatcatagtcagaccaacattgctacgacccgtattcgcaccgacac

SEQ ID NO: 2070 - DNA, 127 bp, synthetic construct
  source 1..127: mol_type = other DNA
acatttgttgatacaaccataaaatgataattacacccataaatggatcattatcacacccaatttaactataacgctctgatcatagtcagaccaacattgctacgacccgtattcgcaccgacac

SEQ ID NO: 2071 - DNA, 127 bp, synthetic construct
  source 1..127: mol_type = other DNA
acatttgttgatacaaccataaaatgataattacacccataaattcatcattatcacacccaatttaactataacgctctgatcatagtcagaccaacattgctacgacccgtattcgcaccgacac

SEQ ID NO: 2072 - DNA, 127 bp, synthetic construct
  source 1..127: mol_type = other DNA
acatttgtcgatacaaccataaaatgataattacacccataaatggatcattatcacacccaatttaactataacgctctgatcatagtcagaccaacattgctacgacccgtattcgcaccgacac

SEQ ID NO: 2073 - DNA, 127 bp, synthetic construct
  source 1..127: mol_type = other DNA
acatttgtcgatacaaccataaaatgataattacacccataaattcatcattatcacacccaatttaactataacgctctgatcatagtcagaccaacattgctacgacccgtattcgcaccgacac

SEQ ID NO: 2074 - DNA, 127 bp, synthetic construct
  source 1..127: mol_type = other DNA
acatttgtggatacaaccataaaatgataattacacccataaatggatcattatcacacccaatttaactataacgctctgatcatagtcagaccaacattgctacgacccgtattcgcaccgacac

SEQ ID NO: 2075 - DNA, 127 bp, synthetic construct
  source 1..127: mol_type = other DNA
acatttgtggatacaaccataaaatgataattacacccataaattcatcattatcacacccaatttaactataacgctctgatcatagtcagaccaacattgctacgacccgtattcgcaccgacac

SEQ ID NO: 2076 - DNA, 127 bp, synthetic construct
  source 1..127: mol_type = other DNA
acatttgttcatacaaccataaaatgataattacacccataaatggatcattatcacacccaatttaactataacgctctgatcatagtcagaccaacattgctacgacccgtattcgcaccgacac

SEQ ID NO: 2077 - DNA, 127 bp, synthetic construct
  source 1..127: mol_type = other DNA
acatttgttcatacaaccataaaatgataattacacccataaattcatcattatcacacccaatttaactataacgctctgatcatagtcagaccaacattgctacgacccgtattcgcaccgacac

SEQ ID NO: 2078 - DNA, 127 bp, synthetic construct
  source 1..127: mol_type = other DNA
acattggttgatacaaccataaaatgataattacacccataaattgataattatcacacccaatttaactataacgctctgatcatagtcagaccaacattgctacgacccgtattcgcaccgacac

SEQ ID NO: 2079 - DNA, 127 bp, synthetic construct
  source 1..127: mol_type = other DNA
acattggtcgatacaaccataaaatgataattacacccataaattgataattatcacacccaatttaactataacgctctgatcatagtcagaccaacattgctacgacccgtattcgcaccgacac

SEQ ID NO: 2080 - DNA, 127 bp, synthetic construct
  source 1..127: mol_type = other DNA
acattggtggatacaaccataaaatgataattacacccataaattgataattatcacacccaatttaactataacgctctgatcatagtcagaccaacattgctacgacccgtattcgcaccgacac

SEQ ID NO: 2081 - DNA, 127 bp, synthetic construct
  source 1..127: mol_type = other DNA
acattggttcatacaaccataaaatgataattacacccataaattgataattatcacacccaatttaactataacgctctgatcatagtcagaccaacattgctacgacccgtattcgcaccgacac

SEQ ID NO: 2082 - DNA, 127 bp, synthetic construct
  source 1..127: mol_type = other DNA
acattggttgatacaaccataaaatgataattacacccataaatggataattatcacacccaatttaactataacgctctgatcatagtcagaccaacattgctacgacccgtattcgcaccgacac

SEQ ID NO: 2083 - DNA, 127 bp, synthetic construct
  source 1..127: mol_type = other DNA
acattggttgatacaaccataaaatgataattacacccataaattcataattatcacacccaatttaactataacgctctgatcatagtcagaccaacattgctacgacccgtattcgcaccgacac

SEQ ID NO: 2084 - DNA, 127 bp, synthetic construct
  source 1..127: mol_type = other DNA
acattggtcgatacaaccataaaatgataattacacccataaatggataattatcacacccaatttaactataacgctctgatcatagtcagaccaacattgctacgacccgtattcgcaccgacac

SEQ ID NO: 2085 - DNA, 127 bp, synthetic construct
  source 1..127: mol_type = other DNA
acattggtcgatacaaccataaaatgataattacacccataaattcataattatcacacccaatttaactataacgctctgatcatagtcagaccaacattgctacgacccgtattcgcaccgacac

SEQ ID NO: 2086 - DNA, 127 bp, synthetic construct
  source 1..127: mol_type = other DNA
acattggtggatacaaccataaaatgataattacacccataaatggataattatcacacccaatttaactataacgctctgatcatagtcagaccaacattgctacgacccgtattcgcaccgacac

SEQ ID NO: 2087 - DNA, 127 bp, synthetic construct
  source 1..127: mol_type = other DNA
acattggtggatacaaccataaaatgataattacacccataaattcataattatcacacccaatttaactataacgctctgatcatagtcagaccaacattgctacgacccgtattcgcaccgacac

SEQ ID NO: 2088 - DNA, 127 bp, synthetic construct
  source 1..127: mol_type = other DNA
acattggttcatacaaccataaaatgataattacacccataaatggataattatcacacccaatttaactataacgctctgatcatagtcagaccaacattgctacgacccgtattcgcaccgacac

SEQ ID NO: 2089 - DNA, 127 bp, synthetic construct
  source 1..127: mol_type = other DNA
acattggttcatacaaccataaaatgataattacacccataaattcataattatcacacccaatttaactataacgctctgatcatagtcagaccaacattgctacgacccgtattcgcaccgacac

SEQ ID NO: 2090 - DNA, 127 bp, synthetic construct
  source 1..127: mol_type = other DNA
acattggttgatacaaccataaaatgataattacacccataaattgatcattatcacacccaatttaactataacgctctgatcatagtcagaccaacattgctacgacccgtattcgcaccgacac

SEQ ID NO: 2091 - DNA, 127 bp, synthetic construct
  source 1..127: mol_type = other DNA
acattggtcgatacaaccataaaatgataattacacccataaattgatcattatcacacccaatttaactataacgctctgatcatagtcagaccaacattgctacgacccgtattcgcaccgacac

SEQ ID NO: 2092 - DNA, 127 bp, synthetic construct
  source 1..127: mol_type = other DNA
acattggtggatacaaccataaaatgataattacacccataaattgatcattatcacacccaatttaactataacgctctgatcatagtcagaccaacattgctacgacccgtattcgcaccgacac

SEQ ID NO: 2093 - DNA, 127 bp, synthetic construct
  source 1..127: mol_type = other DNA
acattggttcatacaaccataaaatgataattacacccataaattgatcattatcacacccaatttaactataacgctctgatcatagtcagaccaacattgctacgacccgtattcgcaccgacac

SEQ ID NO: 2094 - DNA, 127 bp, synthetic construct
  source 1..127: mol_type = other DNA
acattggttgatacaaccataaaatgataattacacccataaatggatcattatcacacccaatttaactataacgctctgatcatagtcagaccaacattgctacgacccgtattcgcaccgacac

SEQ ID NO: 2095 - DNA, 127 bp, synthetic construct
  source 1..127: mol_type = other DNA
acattggttgatacaaccataaaatgataattacacccataaattcatcattatcacacccaatttaactataacgctctgatcatagtcagaccaacattgctacgacccgtattcgcaccgacac

SEQ ID NO: 2096 - DNA, 127 bp, synthetic construct
  source 1..127: mol_type = other DNA
acattggtcgatacaaccataaaatgataattacacccataaatggatcattatcacacccaatttaactataacgctctgatcatagtcagaccaacattgctacgacccgtattcgcaccgacac

SEQ ID NO: 2097 - DNA, 127 bp, synthetic construct
  source 1..127: mol_type = other DNA
acattggtcgatacaaccataaaatgataattacacccataaattcatcattatcacacccaatttaactataacgctctgatcatagtcagaccaacattgctacgacccgtattcgcaccgacac

SEQ ID NO: 2098 - DNA, 127 bp, synthetic construct
  source 1..127: mol_type = other DNA
acattggtggatacaaccataaaatgataattacacccataaatggatcattatcacacccaatttaactataacgctctgatcatagtcagaccaacattgctacgacccgtattcgcaccgacac

SEQ ID NO: 2099 - DNA, 127 bp, synthetic construct
  source 1..127: mol_type = other DNA
acattggtggatacaaccataaaatgataattacacccataaattcatcattatcacacccaatttaactataacgctctgatcatagtcagaccaacattgctacgacccgtattcgcaccgacac

SEQ ID NO: 2100 - DNA, 127 bp, synthetic construct
  source 1..127: mol_type = other DNA
acattggttcatacaaccataaaatgataattacacccataaatggatcattatcacacccaatttaactataacgctctgatcatagtcagaccaacattgctacgacccgtattcgcaccgacac

SEQ ID NO: 2101 - DNA, 127 bp, synthetic construct
  source 1..127: mol_type = other DNA
acattggttcatacaaccataaaatgataattacacccataaattcatcattatcacacccaatttaactataacgctctgatcatagtcagaccaacattgctacgacccgtattcgcaccgacac

SEQ ID NO: 2102 - DNA, 127 bp, synthetic construct
  source 1..127: mol_type = other DNA
acatttcttgatacaaccataaaatgataattacacccataaattgataattatcacacccaatttaactataacgctctgatcatagtcagaccaacattgctacgacccgtattcgcaccgacac

SEQ ID NO: 2103 - DNA, 127 bp, synthetic construct
  source 1..127: mol_type = other DNA
acatttctcgatacaaccataaaatgataattacacccataaattgataattatcacacccaatttaactataacgctctgatcatagtcagaccaacattgctacgacccgtattcgcaccgacac

SEQ ID NO: 2104 - DNA, 127 bp, synthetic construct
  source 1..127: mol_type = other DNA
acatttctggatacaaccataaaatgataattacacccataaattgataattatcacacccaatttaactataacgctctgatcatagtcagaccaacattgctacgacccgtattcgcaccgacac

SEQ ID NO: 2105 - DNA, 127 bp, synthetic construct
  source 1..127: mol_type = other DNA
acatttcttcatacaaccataaaatgataattacacccataaattgataattatcacacccaatttaactataacgctctgatcatagtcagaccaacattgctacgacccgtattcgcaccgacac

SEQ ID NO: 2106 - DNA, 127 bp, synthetic construct
  source 1..127: mol_type = other DNA
acatttcttgatacaaccataaaatgataattacacccataaatggataattatcacacccaatttaactataacgctctgatcatagtcagaccaacattgctacgacccgtattcgcaccgacac

SEQ ID NO: 2107 - DNA, 127 bp, synthetic construct
  source 1..127: mol_type = other DNA
acatttcttgatacaaccataaaatgataattacacccataaattcataattatcacacccaatttaactataacgctctgatcatagtcagaccaacattgctacgacccgtattcgcaccgacac

SEQ ID NO: 2108 - DNA, 127 bp, synthetic construct
  source 1..127: mol_type = other DNA
acatttctcgatacaaccataaaatgataattacacccataaatggataattatcacacccaatttaactataacgctctgatcatagtcagaccaacattgctacgacccgtattcgcaccgacac

SEQ ID NO: 2109 - DNA, 127 bp, synthetic construct
  source 1..127: mol_type = other DNA
acatttctcgatacaaccataaaatgataattacacccataaattcataattatcacacccaatttaactataacgctctgatcatagtcagaccaacattgctacgacccgtattcgcaccgacac

SEQ ID NO: 2110 - DNA, 127 bp, synthetic construct
  source 1..127: mol_type = other DNA
acatttctggatacaaccataaaatgataattacacccataaatggataattatcacacccaatttaactataacgctctgatcatagtcagaccaacattgctacgacccgtattcgcaccgacac

SEQ ID NO: 2111 - DNA, 127 bp, synthetic construct
  source 1..127: mol_type = other DNA
acatttctggatacaaccataaaatgataattacacccataaattcataattatcacacccaatttaactataacgctctgatcatagtcagaccaacattgctacgacccgtattcgcaccgacac

SEQ ID NO: 2112 - DNA, 127 bp, synthetic construct
  source 1..127: mol_type = other DNA
acatttcttcatacaaccataaaatgataattacacccataaatggataattatcacacccaatttaactataacgctctgatcatagtcagaccaacattgctacgacccgtattcgcaccgacac

SEQ ID NO: 2113 - DNA, 127 bp, synthetic construct
  source 1..127: mol_type = other DNA
acatttcttcatacaaccataaaatgataattacacccataaattcataattatcacacccaatttaactataacgctctgatcatagtcagaccaacattgctacgacccgtattcgcaccgacac

SEQ ID NO: 2114 - DNA, 127 bp, synthetic construct
  source 1..127: mol_type = other DNA
acatttcttgatacaaccataaaatgataattacacccataaattgatcattatcacacccaatttaactataacgctctgatcatagtcagaccaacattgctacgacccgtattcgcaccgacac

SEQ ID NO: 2115 - DNA, 127 bp, synthetic construct
  source 1..127: mol_type = other DNA
acatttctcgatacaaccataaaatgataattacacccataaattgatcattatcacacccaatttaactataacgctctgatcatagtcagaccaacattgctacgacccgtattcgcaccgacac

SEQ ID NO: 2116 - DNA, 127 bp, synthetic construct
  source 1..127: mol_type = other DNA
acatttctggatacaaccataaaatgataattacacccataaattgatcattatcacacccaatttaactataacgctctgatcatagtcagaccaacattgctacgacccgtattcgcaccgacac

SEQ ID NO: 2117 - DNA, 127 bp, synthetic construct
  source 1..127: mol_type = other DNA
acatttcttcatacaaccataaaatgataattacacccataaattgatcattatcacacccaatttaactataacgctctgatcatagtcagaccaacattgctacgacccgtattcgcaccgacac

SEQ ID NO: 2118 - DNA, 127 bp, synthetic construct
  source 1..127: mol_type = other DNA
acatttcttgatacaaccataaaatgataattacacccataaatggatcattatcacacccaatttaactataacgctctgatcatagtcagaccaacattgctacgacccgtattcgcaccgacac

SEQ ID NO: 2119 - DNA, 127 bp, synthetic construct
  source 1..127: mol_type = other DNA
acatttcttgatacaaccataaaatgataattacacccataaattcatcattatcacacccaatttaactataacgctctgatcatagtcagaccaacattgctacgacccgtattcgcaccgacac

SEQ ID NO: 2120 - DNA, 127 bp, synthetic construct
  source 1..127: mol_type = other DNA
acatttctcgatacaaccataaaatgataattacacccataaatggatcattatcacacccaatttaactataacgctctgatcatagtcagaccaacattgctacgacccgtattcgcaccgacac

SEQ ID NO: 2121 - DNA, 127 bp, synthetic construct
  source 1..127: mol_type = other DNA
acatttctcgatacaaccataaaatgataattacacccataaattcatcattatcacacccaatttaactataacgctctgatcatagtcagaccaacattgctacgacccgtattcgcaccgacac

SEQ ID NO: 2122 - DNA, 127 bp, synthetic construct
  source 1..127: mol_type = other DNA
acatttctggatacaaccataaaatgataattacacccataaatggatcattatcacacccaatttaactataacgctctgatcatagtcagaccaacattgctacgacccgtattcgcaccgacac

SEQ ID NO: 2123 - DNA, 127 bp, synthetic construct
  source 1..127: mol_type = other DNA
acatttctggatacaaccataaaatgataattacacccataaattcatcattatcacacccaatttaactataacgctctgatcatagtcagaccaacattgctacgacccgtattcgcaccgacac

SEQ ID NO: 2124 - DNA, 127 bp, synthetic construct
  source 1..127: mol_type = other DNA
acatttcttcatacaaccataaaatgataattacacccataaatggatcattatcacacccaatttaactataacgctctgatcatagtcagaccaacattgctacgacccgtattcgcaccgacac

SEQ ID NO: 2125 - DNA, 127 bp, synthetic construct
  source 1..127: mol_type = other DNA
acatttcttcatacaaccataaaatgataattacacccataaattcatcattatcacacccaatttaactataacgctctgatcatagtcagaccaacattgctacgacccgtattcgcaccgacac

SEQ ID NO: 2126 - DNA, 127 bp, synthetic construct
  source 1..127: mol_type = other DNA
acattagttgatacaaccataaaatgataattacacccataaattgataattatcacacccaatttaactataacgctctgatcatagtcagaccaacattgctacgacccgtattcgcaccgacac

SEQ ID NO: 2127 - DNA, 127 bp, synthetic construct
  source 1..127: mol_type = other DNA
acattagtcgatacaaccataaaatgataattacacccataaattgataattatcacacccaatttaactataacgctctgatcatagtcagaccaacattgctacgacccgtattcgcaccgacac

SEQ ID NO: 2128 - DNA, 127 bp, synthetic construct
  source 1..127: mol_type = other DNA
acattagtggatacaaccataaaatgataattacacccataaattgataattatcacacccaatttaactataacgctctgatcatagtcagaccaacattgctacgacccgtattcgcaccgacac

SEQ ID NO: 2129 - DNA, 127 bp, synthetic construct
  source 1..127: mol_type = other DNA
acattagttcatacaaccataaaatgataattacacccataaattgataattatcacacccaatttaactataacgctctgatcatagtcagaccaacattgctacgacccgtattcgcaccgacac

SEQ ID NO: 2130 - DNA, 127 bp, synthetic construct
  source 1..127: mol_type = other DNA
acattagttgatacaaccataaaatgataattacacccataaatggataattatcacacccaatttaactataacgctctgatcatagtcagaccaacattgctacgacccgtattcgcaccgacac

SEQ ID NO: 2131 - DNA, 127 bp, synthetic construct
  source 1..127: mol_type = other DNA
acattagttgatacaaccataaaatgataattacacccataaattcataattatcacacccaatttaactataacgctctgatcatagtcagaccaacattgctacgacccgtattcgcaccgacac

SEQ ID NO: 2132 - DNA, 127 bp, synthetic construct
  source 1..127: mol_type = other DNA
acattagtcgatacaaccataaaatgataattacacccataaatggataattatcacacccaatttaactataacgctctgatcatagtcagaccaacattgctacgacccgtattcgcaccgacac

SEQ ID NO: 2133 - DNA, 127 bp, synthetic construct
  source 1..127: mol_type = other DNA
acattagtcgatacaaccataaaatgataattacacccataaattcataattatcacacccaatttaactataacgctctgatcatagtcagaccaacattgctacgacccgtattcgcaccgacac

SEQ ID NO: 2134 - DNA, 127 bp, synthetic construct
  source 1..127: mol_type = other DNA
acattagtggatacaaccataaaatgataattacacccataaatggataattatcacacccaatttaactataacgctctgatcatagtcagaccaacattgctacgacccgtattcgcaccgacac

SEQ ID NO: 2135 - DNA, 127 bp, synthetic construct
  source 1..127: mol_type = other DNA
acattagtggatacaaccataaaatgataattacacccataaattcataattatcacacccaatttaactataacgctctgatcatagtcagaccaacattgctacgacccgtattcgcaccgacac

SEQ ID NO: 2136 - DNA, 127 bp, synthetic construct
  source 1..127: mol_type = other DNA
acattagttcatacaaccataaaatgataattacacccataaatggataattatcacacccaatttaactataacgctctgatcatagtcagaccaacattgctacgacccgtattcgcaccgacac

SEQ ID NO: 2137 - DNA, 127 bp, synthetic construct
  source 1..127: mol_type = other DNA
acattagttcatacaaccataaaatgataattacacccataaattcataattatcacacccaatttaactataacgctctgatcatagtcagaccaacattgctacgacccgtattcgcaccgacac

SEQ ID NO: 2138 - DNA, 127 bp, synthetic construct
  source 1..127: mol_type = other DNA
acattagttgatacaaccataaaatgataattacacccataaattgatcattatcacacccaatttaactataacgctctgatcatagtcagaccaacattgctacgacccgtattcgcaccgacac

SEQ ID NO: 2139 - DNA, 127 bp, synthetic construct
  source 1..127: mol_type = other DNA
acattagtcgatacaaccataaaatgataattacacccataaattgatcattatcacacccaatttaactataacgctctgatcatagtcagaccaacattgctacgacccgtattcgcaccgacac

SEQ ID NO: 2140 - DNA, 127 bp, synthetic construct
  source 1..127: mol_type = other DNA
acattagtggatacaaccataaaatgataattacacccataaattgatcattatcacacccaatttaactataacgctctgatcatagtcagaccaacattgctacgacccgtattcgcaccgacac

SEQ ID NO: 2141 - DNA, 127 bp, synthetic construct
  source 1..127: mol_type = other DNA
acattagttcatacaaccataaaatgataattacacccataaattgatcattatcacacccaatttaactataacgctctgatcatagtcagaccaacattgctacgacccgtattcgcaccgacac

SEQ ID NO: 2142 - DNA, 127 bp, synthetic construct
  source 1..127: mol_type = other DNA
acattagttgatacaaccataaaatgataattacacccataaatggatcattatcacacccaatttaactataacgctctgatcatagtcagaccaacattgctacgacccgtattcgcaccgacac

SEQ ID NO: 2143 - DNA, 127 bp, synthetic construct
  source 1..127: mol_type = other DNA
acattagttgatacaaccataaaatgataattacacccataaattcatcattatcacacccaatttaactataacgctctgatcatagtcagaccaacattgctacgacccgtattcgcaccgacac

SEQ ID NO: 2144 - DNA, 127 bp, synthetic construct
  source 1..127: mol_type = other DNA
acattagtcgatacaaccataaaatgataattacacccataaatggatcattatcacacccaatttaactataacgctctgatcatagtcagaccaacattgctacgacccgtattcgcaccgacac

SEQ ID NO: 2145 - DNA, 127 bp, synthetic construct
  source 1..127: mol_type = other DNA
acattagtcgatacaaccataaaatgataattacacccataaattcatcattatcacacccaatttaactataacgctctgatcatagtcagaccaacattgctacgacccgtattcgcaccgacac

SEQ ID NO: 2146 - DNA, 127 bp, synthetic construct
  source 1..127: mol_type = other DNA
acattagtggatacaaccataaaatgataattacacccataaatggatcattatcacacccaatttaactataacgctctgatcatagtcagaccaacattgctacgacccgtattcgcaccgacac

SEQ ID NO: 2147 - DNA, 127 bp, synthetic construct
  source 1..127: mol_type = other DNA
acattagtggatacaaccataaaatgataattacacccataaattcatcattatcacacccaatttaactataacgctctgatcatagtcagaccaacattgctacgacccgtattcgcaccgacac

SEQ ID NO: 2148 - DNA, 127 bp, synthetic construct
  source 1..127: mol_type = other DNA
acattagttcatacaaccataaaatgataattacacccataaatggatcattatcacacccaatttaactataacgctctgatcatagtcagaccaacattgctacgacccgtattcgcaccgacac

SEQ ID NO: 2149 - DNA, 127 bp, synthetic construct
  source 1..127: mol_type = other DNA
acattagttcatacaaccataaaatgataattacacccataaattcatcattatcacacccaatttaactataacgctctgatcatagtcagaccaacattgctacgacccgtattcgcaccgacac

SEQ ID NO: 2150 - DNA, 127 bp, synthetic construct
  source 1..127: mol_type = other DNA
acatttgttgatacaaccctaaaatgataattacacccataaattgataattatcacacccaatttaactataacgctctgatcatagtcagaccaacattgctacgacccgtattcgcaccgacac

SEQ ID NO: 2151 - DNA, 127 bp, synthetic construct
  source 1..127: mol_type = other DNA
acatttgtcgatacaaccctaaaatgataattacacccataaattgataattatcacacccaatttaactataacgctctgatcatagtcagaccaacattgctacgacccgtattcgcaccgacac

SEQ ID NO: 2152 - DNA, 127 bp, synthetic construct
  source 1..127: mol_type = other DNA
acatttgtggatacaaccctaaaatgataattacacccataaattgataattatcacacccaatttaactataacgctctgatcatagtcagaccaacattgctacgacccgtattcgcaccgacac

SEQ ID NO: 2153 - DNA, 127 bp, synthetic construct
  source 1..127: mol_type = other DNA
acatttgttcatacaaccctaaaatgataattacacccataaattgataattatcacacccaatttaactataacgctctgatcatagtcagaccaacattgctacgacccgtattcgcaccgacac

SEQ ID NO: 2154 - DNA, 127 bp, synthetic construct
  source 1..127: mol_type = other DNA
acatttgttgatacaaccctaaaatgataattacacccataaatggataattatcacacccaatttaactataacgctctgatcatagtcagaccaacattgctacgacccgtattcgcaccgacac

SEQ ID NO: 2155 - DNA, 127 bp, synthetic construct
  source 1..127: mol_type = other DNA
acatttgttgatacaaccctaaaatgataattacacccataaattcataattatcacacccaatttaactataacgctctgatcatagtcagaccaacattgctacgacccgtattcgcaccgacac

SEQ ID NO: 2156 - DNA, 127 bp, synthetic construct
  source 1..127: mol_type = other DNA
acatttgtcgatacaaccctaaaatgataattacacccataaatggataattatcacacccaatttaactataacgctctgatcatagtcagaccaacattgctacgacccgtattcgcaccgacac

SEQ ID NO: 2157 - DNA, 127 bp, synthetic construct
  source 1..127: mol_type = other DNA
acatttgtcgatacaaccctaaaatgataattacacccataaattcataattatcacacccaatttaactataacgctctgatcatagtcagaccaacattgctacgacccgtattcgcaccgacac

SEQ ID NO: 2158 - DNA, 127 bp, synthetic construct
  source 1..127: mol_type = other DNA
acatttgtggatacaaccctaaaatgataattacacccataaatggataattatcacacccaatttaactataacgctctgatcatagtcagaccaacattgctacgacccgtattcgcaccgacac

SEQ ID NO: 2159 - DNA, 127 bp, synthetic construct
  source 1..127: mol_type = other DNA
acatttgtggatacaaccctaaaatgataattacacccataaattcataattatcacacccaatttaactataacgctctgatcatagtcagaccaacattgctacgacccgtattcgcaccgacac

SEQ ID NO: 2160 - DNA, 127 bp, synthetic construct
  source 1..127: mol_type = other DNA
acatttgttcatacaaccctaaaatgataattacacccataaatggataattatcacacccaatttaactataacgctctgatcatagtcagaccaacattgctacgacccgtattcgcaccgacac

SEQ ID NO: 2161 - DNA, 127 bp, synthetic construct
  source 1..127: mol_type = other DNA
acatttgttcatacaaccctaaaatgataattacacccataaattcataattatcacacccaatttaactataacgctctgatcatagtcagaccaacattgctacgacccgtattcgcaccgacac

SEQ ID NO: 2162 - DNA, 127 bp, synthetic construct
  source 1..127: mol_type = other DNA
acatttgttgatacaaccctaaaatgataattacacccataaattgatcattatcacacccaatttaactataacgctctgatcatagtcagaccaacattgctacgacccgtattcgcaccgacac

SEQ ID NO: 2163 - DNA, 127 bp, synthetic construct
  source 1..127: mol_type = other DNA
acatttgtcgatacaaccctaaaatgataattacacccataaattgatcattatcacacccaatttaactataacgctctgatcatagtcagaccaacattgctacgacccgtattcgcaccgacac

SEQ ID NO: 2164 - DNA, 127 bp, synthetic construct
  source 1..127: mol_type = other DNA
acatttgtggatacaaccctaaaatgataattacacccataaattgatcattatcacacccaatttaactataacgctctgatcatagtcagaccaacattgctacgacccgtattcgcaccgacac

SEQ ID NO: 2165 - DNA, 127 bp, synthetic construct
  source 1..127: mol_type = other DNA
acatttgttcatacaaccctaaaatgataattacacccataaattgatcattatcacacccaatttaactataacgctctgatcatagtcagaccaacattgctacgacccgtattcgcaccgacac

SEQ ID NO: 2166 - DNA, 127 bp, synthetic construct
  source 1..127: mol_type = other DNA
acatttgttgatacaaccctaaaatgataattacacccataaatggatcattatcacacccaatttaactataacgctctgatcatagtcagaccaacattgctacgacccgtattcgcaccgacac

SEQ ID NO: 2167 - DNA, 127 bp, synthetic construct
  source 1..127: mol_type = other DNA
acatttgttgatacaaccctaaaatgataattacacccataaattcatcattatcacacccaatttaactataacgctctgatcatagtcagaccaacattgctacgacccgtattcgcaccgacac

SEQ ID NO: 2168 - DNA, 127 bp, synthetic construct
  source 1..127: mol_type = other DNA
acatttgtcgatacaaccctaaaatgataattacacccataaatggatcattatcacacccaatttaactataacgctctgatcatagtcagaccaacattgctacgacccgtattcgcaccgacac

SEQ ID NO: 2169 - DNA, 127 bp, synthetic construct
  source 1..127: mol_type = other DNA
acatttgtcgatacaaccctaaaatgataattacacccataaattcatcattatcacacccaatttaactataacgctctgatcatagtcagaccaacattgctacgacccgtattcgcaccgacac

SEQ ID NO: 2170 - DNA, 127 bp, synthetic construct
  source 1..127: mol_type = other DNA
acatttgtggatacaaccctaaaatgataattacacccataaatggatcattatcacacccaatttaactataacgctctgatcatagtcagaccaacattgctacgacccgtattcgcaccgacac

SEQ ID NO: 2171 - DNA, 127 bp, synthetic construct
  source 1..127: mol_type = other DNA
acatttgtggatacaaccctaaaatgataattacacccataaattcatcattatcacacccaatttaactataacgctctgatcatagtcagaccaacattgctacgacccgtattcgcaccgacac

SEQ ID NO: 2172 - DNA, 127 bp, synthetic construct
  source 1..127: mol_type = other DNA
acatttgttcatacaaccctaaaatgataattacacccataaatggatcattatcacacccaatttaactataacgctctgatcatagtcagaccaacattgctacgacccgtattcgcaccgacac

SEQ ID NO: 2173 - DNA, 127 bp, synthetic construct
  source 1..127: mol_type = other DNA
acatttgttcatacaaccctaaaatgataattacacccataaattcatcattatcacacccaatttaactataacgctctgatcatagtcagaccaacattgctacgacccgtattcgcaccgacac

SEQ ID NO: 2174 - DNA, 127 bp, synthetic construct
  source 1..127: mol_type = other DNA
acatttgttgatacaaccataaaatgataattacacccataaattgataattatcacccccaatttaactataacgctctgatcatagtcagaccaacattgctacgacccgtattcgcaccgacac

SEQ ID NO: 2175 - DNA, 127 bp, synthetic construct
  source 1..127: mol_type = other DNA
acatttgtcgatacaaccataaaatgataattacacccataaattgataattatcacccccaatttaactataacgctctgatcatagtcagaccaacattgctacgacccgtattcgcaccgacac

SEQ ID NO: 2176 - DNA, 127 bp, synthetic construct
  source 1..127: mol_type = other DNA
acatttgtggatacaaccataaaatgataattacacccataaattgataattatcacccccaatttaactataacgctctgatcatagtcagaccaacattgctacgacccgtattcgcaccgacac

SEQ ID NO: 2177 - DNA, 127 bp, synthetic construct
  source 1..127: mol_type = other DNA
acatttgttcatacaaccataaaatgataattacacccataaattgataattatcacccccaatttaactataacgctctgatcatagtcagaccaacattgctacgacccgtattcgcaccgacac

SEQ ID NO: 2178 - DNA, 127 bp, synthetic construct
  source 1..127: mol_type = other DNA
acatttgttgatacaaccataaaatgataattacacccataaatggataattatcacccccaatttaactataacgctctgatcatagtcagaccaacattgctacgacccgtattcgcaccgacac

SEQ ID NO: 2179 - DNA, 127 bp, synthetic construct
  source 1..127: mol_type = other DNA
acatttgttgatacaaccataaaatgataattacacccataaattcataattatcacccccaatttaactataacgctctgatcatagtcagaccaacattgctacgacccgtattcgcaccgacac

SEQ ID NO: 2180 - DNA, 127 bp, synthetic construct
  source 1..127: mol_type = other DNA
acatttgtcgatacaaccataaaatgataattacacccataaatggataattatcacccccaatttaactataacgctctgatcatagtcagaccaacattgctacgacccgtattcgcaccgacac

SEQ ID NO: 2181 - DNA, 127 bp, synthetic construct
  source 1..127: mol_type = other DNA
acatttgtcgatacaaccataaaatgataattacacccataaattcataattatcacccccaatttaactataacgctctgatcatagtcagaccaacattgctacgacccgtattcgcaccgacac

SEQ ID NO: 2182 - DNA, 127 bp, synthetic construct
  source 1..127: mol_type = other DNA
acatttgtggatacaaccataaaatgataattacacccataaatggataattatcacccccaatttaactataacgctctgatcatagtcagaccaacattgctacgacccgtattcgcaccgacac

SEQ ID NO: 2183 - DNA, 127 bp, synthetic construct
  source 1..127: mol_type = other DNA
acatttgtggatacaaccataaaatgataattacacccataaattcataattatcacccccaatttaactataacgctctgatcatagtcagaccaacattgctacgacccgtattcgcaccgacac

SEQ ID NO: 2184 - DNA, 127 bp, synthetic construct
  source 1..127: mol_type = other DNA
acatttgttcatacaaccataaaatgataattacacccataaatggataattatcacccccaatttaactataacgctctgatcatagtcagaccaacattgctacgacccgtattcgcaccgacac

SEQ ID NO: 2185 - DNA, 127 bp, synthetic construct
  source 1..127: mol_type = other DNA
acatttgttcatacaaccataaaatgataattacacccataaattcataattatcacccccaatttaactataacgctctgatcatagtcagaccaacattgctacgacccgtattcgcaccgacac

SEQ ID NO: 2186 - DNA, 127 bp, synthetic construct
  source 1..127: mol_type = other DNA
acatttgttgatacaaccataaaatgataattacacccataaattgatcattatcacccccaatttaactataacgctctgatcatagtcagaccaacattgctacgacccgtattcgcaccgacac

SEQ ID NO: 2187 - DNA, 127 bp, synthetic construct
  source 1..127: mol_type = other DNA
acatttgtcgatacaaccataaaatgataattacacccataaattgatcattatcacccccaatttaactataacgctctgatcatagtcagaccaacattgctacgacccgtattcgcaccgacac

SEQ ID NO: 2188 - DNA, 127 bp, synthetic construct
  source 1..127: mol_type = other DNA
acatttgtggatacaaccataaaatgataattacacccataaattgatcattatcacccccaatttaactataacgctctgatcatagtcagaccaacattgctacgacccgtattcgcaccgacac

SEQ ID NO: 2189 - DNA, 127 bp, synthetic construct
  source 1..127: mol_type = other DNA
acatttgttcatacaaccataaaatgataattacacccataaattgatcattatcacccccaatttaactataacgctctgatcatagtcagaccaacattgctacgacccgtattcgcaccgacac

SEQ ID NO: 2190 - DNA, 127 bp, synthetic construct
  source 1..127: mol_type = other DNA
acatttgttgatacaaccataaaatgataattacacccataaatggatcattatcacccccaatttaactataacgctctgatcatagtcagaccaacattgctacgacccgtattcgcaccgacac

SEQ ID NO: 2191 - DNA, 127 bp, synthetic construct
  source 1..127: mol_type = other DNA
acatttgttgatacaaccataaaatgataattacacccataaattcatcattatcacccccaatttaactataacgctctgatcatagtcagaccaacattgctacgacccgtattcgcaccgacac

SEQ ID NO: 2192 - DNA, 127 bp, synthetic construct
  source 1..127: mol_type = other DNA
acatttgtcgatacaaccataaaatgataattacacccataaatggatcattatcacccccaatttaactataacgctctgatcatagtcagaccaacattgctacgacccgtattcgcaccgacac

SEQ ID NO: 2193 - DNA, 127 bp, synthetic construct
  source 1..127: mol_type = other DNA
acatttgtcgatacaaccataaaatgataattacacccataaattcatcattatcacccccaatttaactataacgctctgatcatagtcagaccaacattgctacgacccgtattcgcaccgacac

SEQ ID NO: 2194 - DNA, 127 bp, synthetic construct
  source 1..127: mol_type = other DNA
acatttgtggatacaaccataaaatgataattacacccataaatggatcattatcacccccaatttaactataacgctctgatcatagtcagaccaacattgctacgacccgtattcgcaccgacac

SEQ ID NO: 2195 - DNA, 127 bp, synthetic construct
  source 1..127: mol_type = other DNA
acatttgtggatacaaccataaaatgataattacacccataaattcatcattatcacccccaatttaactataacgctctgatcatagtcagaccaacattgctacgacccgtattcgcaccgacac

SEQ ID NO: 2196 - DNA, 127 bp, synthetic construct
  source 1..127: mol_type = other DNA
acatttgttcatacaaccataaaatgataattacacccataaatggatcattatcacccccaatttaactataacgctctgatcatagtcagaccaacattgctacgacccgtattcgcaccgacac

SEQ ID NO: 2197 - DNA, 127 bp, synthetic construct
  source 1..127: mol_type = other DNA
acatttgttcatacaaccataaaatgataattacacccataaattcatcattatcacccccaatttaactataacgctctgatcatagtcagaccaacattgctacgacccgtattcgcaccgacac

SEQ ID NO: 2198 - DNA, 127 bp, synthetic construct
  source 1..127: mol_type = other DNA
acatttgttgatacaaccctaaaatgataattacacccataaattgataattatcacccccaatttaactataacgctctgatcatagtcagaccaacattgctacgacccgtattcgcaccgacac

SEQ ID NO: 2199 - DNA, 127 bp, synthetic construct
  source 1..127: mol_type = other DNA
acatttgtcgatacaaccctaaaatgataattacacccataaattgataattatcacccccaatttaactataacgctctgatcatagtcagaccaacattgctacgacccgtattcgcaccgacac

SEQ ID NO: 2200 - DNA, 127 bp, synthetic construct
  source 1..127: mol_type = other DNA
acatttgtggatacaaccctaaaatgataattacacccataaattgataattatcacccccaatttaactataacgctctgatcatagtcagaccaacattgctacgacccgtattcgcaccgacac

SEQ ID NO: 2201 - DNA, 127 bp, synthetic construct
  source 1..127: mol_type = other DNA
acatttgttcatacaaccctaaaatgataattacacccataaattgataattatcacccccaatttaactataacgctctgatcatagtcagaccaacattgctacgacccgtattcgcaccgacac

SEQ ID NO: 2202 - DNA, 127 bp, synthetic construct
  source 1..127: mol_type = other DNA
acatttgttgatacaaccctaaaatgataattacacccataaatggataattatcacccccaatttaactataacgctctgatcatagtcagaccaacattgctacgacccgtattcgcaccgacac

SEQ ID NO: 2203 - DNA, 127 bp, synthetic construct
  source 1..127: mol_type = other DNA
acatttgttgatacaaccctaaaatgataattacacccataaattcataattatcacccccaatttaactataacgctctgatcatagtcagaccaacattgctacgacccgtattcgcaccgacac

SEQ ID NO: 2204 - DNA, 127 bp, synthetic construct
  source 1..127: mol_type = other DNA
acatttgtcgatacaaccctaaaatgataattacacccataaatggataattatcacccccaatttaactataacgctctgatcatagtcagaccaacattgctacgacccgtattcgcaccgacac

SEQ ID NO: 2205 - DNA, 127 bp, synthetic construct
  source 1..127: mol_type = other DNA
acatttgtcgatacaaccctaaaatgataattacacccataaattcataattatcacccccaatttaactataacgctctgatcatagtcagaccaacattgctacgacccgtattcgcaccgacac

SEQ ID NO: 2206 - DNA, 127 bp, synthetic construct
  source 1..127: mol_type = other DNA
acatttgtggatacaaccctaaaatgataattacacccataaatggataattatcacccccaatttaactataacgctctgatcatagtcagaccaacattgctacgacccgtattcgcaccgacac

SEQ ID NO: 2207 - DNA, 127 bp, synthetic construct
  source 1..127: mol_type = other DNA
acatttgtggatacaaccctaaaatgataattacacccataaattcataattatcacccccaatttaactataacgctctgatcatagtcagaccaacattgctacgacccgtattcgcaccgacac

SEQ ID NO: 2208 - DNA, 127 bp, synthetic construct
  source 1..127: mol_type = other DNA
acatttgttcatacaaccctaaaatgataattacacccataaatggataattatcacccccaatttaactataacgctctgatcatagtcagaccaacattgctacgacccgtattcgcaccgacac

SEQ ID NO: 2209 - DNA, 127 bp, synthetic construct
  source 1..127: mol_type = other DNA
acatttgttcatacaaccctaaaatgataattacacccataaattcataattatcacccccaatttaactataacgctctgatcatagtcagaccaacattgctacgacccgtattcgcaccgacac

SEQ ID NO: 2210 - DNA, 127 bp, synthetic construct
  source 1..127: mol_type = other DNA
acatttgttgatacaaccctaaaatgataattacacccataaattgatcattatcacccccaatttaactataacgctctgatcatagtcagaccaacattgctacgacccgtattcgcaccgacac

SEQ ID NO: 2211 - DNA, 127 bp, synthetic construct
  source 1..127: mol_type = other DNA
acatttgtcgatacaaccctaaaatgataattacacccataaattgatcattatcacccccaatttaactataacgctctgatcatagtcagaccaacattgctacgacccgtattcgcaccgacac

SEQ ID NO: 2212 - DNA, 127 bp, synthetic construct
  source 1..127: mol_type = other DNA
acatttgtggatacaaccctaaaatgataattacacccataaattgatcattatcacccccaatttaactataacgctctgatcatagtcagaccaacattgctacgacccgtattcgcaccgacac

SEQ ID NO: 2213 - DNA, 127 bp, synthetic construct
  source 1..127: mol_type = other DNA
acatttgttcatacaaccctaaaatgataattacacccataaattgatcattatcacccccaatttaactataacgctctgatcatagtcagaccaacattgctacgacccgtattcgcaccgacac

SEQ ID NO: 2214 - DNA, 127 bp, synthetic construct
  source 1..127: mol_type = other DNA
acatttgttgatacaaccctaaaatgataattacacccataaatggatcattatcacccccaatttaactataacgctctgatcatagtcagaccaacattgctacgacccgtattcgcaccgacac

SEQ ID NO: 2215 - DNA, 127 bp, synthetic construct
  source 1..127: mol_type = other DNA
acatttgttgatacaaccctaaaatgataattacacccataaattcatcattatcacccccaatttaactataacgctctgatcatagtcagaccaacattgctacgacccgtattcgcaccgacac

SEQ ID NO: 2216 - DNA, 127 bp, synthetic construct
  source 1..127: mol_type = other DNA
acatttgtcgatacaaccctaaaatgataattacacccataaatggatcattatcacccccaatttaactataacgctctgatcatagtcagaccaacattgctacgacccgtattcgcaccgacac

SEQ ID NO: 2217 - DNA, 127 bp, synthetic construct
  source 1..127: mol_type = other DNA
acatttgtcgatacaaccctaaaatgataattacacccataaattcatcattatcacccccaatttaactataacgctctgatcatagtcagaccaacattgctacgacccgtattcgcaccgacac

SEQ ID NO: 2218 - DNA, 127 bp, synthetic construct
  source 1..127: mol_type = other DNA
acatttgtggatacaaccctaaaatgataattacacccataaatggatcattatcacccccaatttaactataacgctctgatcatagtcagaccaacattgctacgacccgtattcgcaccgacac

SEQ ID NO: 2219 - DNA, 127 bp, synthetic construct
  source 1..127: mol_type = other DNA
acatttgtggatacaaccctaaaatgataattacacccataaattcatcattatcacccccaatttaactataacgctctgatcatagtcagaccaacattgctacgacccgtattcgcaccgacac

SEQ ID NO: 2220 - DNA, 127 bp, synthetic construct
  source 1..127: mol_type = other DNA
acatttgttcatacaaccctaaaatgataattacacccataaatggatcattatcacccccaatttaactataacgctctgatcatagtcagaccaacattgctacgacccgtattcgcaccgacac

SEQ ID NO: 2221 - DNA, 127 bp, synthetic construct
  source 1..127: mol_type = other DNA
acatttgttcatacaaccctaaaatgataattacacccataaattcatcattatcacccccaatttaactataacgctctgatcatagtcagaccaacattgctacgacccgtattcgcaccgacac

SEQ ID NO: 2222 - DNA, 127 bp, synthetic construct
  source 1..127: mol_type = other DNA
acatttgttgatacaaccataaaacgataattacacccataaattgataattatcacacccaatttaactataacgctctgatcatagtcagaccaacattgctacgacccgtattcgcaccgacac

SEQ ID NO: 2223 - DNA, 127 bp, synthetic construct
  source 1..127: mol_type = other DNA
acatttgtcgatacaaccataaaacgataattacacccataaattgataattatcacacccaatttaactataacgctctgatcatagtcagaccaacattgctacgacccgtattcgcaccgacac

SEQ ID NO: 2224 - DNA, 127 bp, synthetic construct
  source 1..127: mol_type = other DNA
acatttgtggatacaaccataaaacgataattacacccataaattgataattatcacacccaatttaactataacgctctgatcatagtcagaccaacattgctacgacccgtattcgcaccgacac

SEQ ID NO: 2225 - DNA, 127 bp, synthetic construct
  source 1..127: mol_type = other DNA
acatttgttcatacaaccataaaacgataattacacccataaattgataattatcacacccaatttaactataacgctctgatcatagtcagaccaacattgctacgacccgtattcgcaccgacac

SEQ ID NO: 2226 - DNA, 127 bp, synthetic construct
  source 1..127: mol_type = other DNA
acatttgttgatacaaccataaaacgataattacacccataaatggataattatcacacccaatttaactataacgctctgatcatagtcagaccaacattgctacgacccgtattcgcaccgacac

SEQ ID NO: 2227 - DNA, 127 bp, synthetic construct
  source 1..127: mol_type = other DNA
acatttgttgatacaaccataaaacgataattacacccataaattcataattatcacacccaatttaactataacgctctgatcatagtcagaccaacattgctacgacccgtattcgcaccgacac

SEQ ID NO: 2228 - DNA, 127 bp, synthetic construct
  source 1..127: mol_type = other DNA
acatttgtcgatacaaccataaaacgataattacacccataaatggataattatcacacccaatttaactataacgctctgatcatagtcagaccaacattgctacgacccgtattcgcaccgacac

SEQ ID NO: 2229 - DNA, 127 bp, synthetic construct
  source 1..127: mol_type = other DNA
acatttgtcgatacaaccataaaacgataattacacccataaattcataattatcacacccaatttaactataacgctctgatcatagtcagaccaacattgctacgacccgtattcgcaccgacac

SEQ ID NO: 2230 - DNA, 127 bp, synthetic construct
  source 1..127: mol_type = other DNA
acatttgtggatacaaccataaaacgataattacacccataaatggataattatcacacccaatttaactataacgctctgatcatagtcagaccaacattgctacgacccgtattcgcaccgacac

SEQ ID NO: 2231 - DNA, 127 bp, synthetic construct
  source 1..127: mol_type = other DNA
acatttgtggatacaaccataaaacgataattacacccataaattcataattatcacacccaatttaactataacgctctgatcatagtcagaccaacattgctacgacccgtattcgcaccgacac

SEQ ID NO: 2232 - DNA, 127 bp, synthetic construct
  source 1..127: mol_type = other DNA
acatttgttcatacaaccataaaacgataattacacccataaatggataattatcacacccaatttaactataacgctctgatcatagtcagaccaacattgctacgacccgtattcgcaccgacac

SEQ ID NO: 2233 - DNA, 127 bp, synthetic construct
  source 1..127: mol_type = other DNA
acatttgttcatacaaccataaaacgataattacacccataaattcataattatcacacccaatttaactataacgctctgatcatagtcagaccaacattgctacgacccgtattcgcaccgacac

SEQ ID NO: 2234 - DNA, 127 bp, synthetic construct
  source 1..127: mol_type = other DNA
acatttgttgatacaaccataaaacgataattacacccataaattgatcattatcacacccaatttaactataacgctctgatcatagtcagaccaacattgctacgacccgtattcgcaccgacac

SEQ ID NO: 2235 - DNA, 127 bp, synthetic construct
  source 1..127: mol_type = other DNA
acatttgtcgatacaaccataaaacgataattacacccataaattgatcattatcacacccaatttaactataacgctctgatcatagtcagaccaacattgctacgacccgtattcgcaccgacac

SEQ ID NO: 2236 - DNA, 127 bp, synthetic construct
  source 1..127: mol_type = other DNA
acatttgtggatacaaccataaaacgataattacacccataaattgatcattatcacacccaatttaactataacgctctgatcatagtcagaccaacattgctacgacccgtattcgcaccgacac

SEQ ID NO: 2237 - DNA, 127 bp, synthetic construct
  source 1..127: mol_type = other DNA
acatttgttcatacaaccataaaacgataattacacccataaattgatcattatcacacccaatttaactataacgctctgatcatagtcagaccaacattgctacgacccgtattcgcaccgacac

SEQ ID NO: 2238 - DNA, 127 bp, synthetic construct
  source 1..127: mol_type = other DNA
acatttgttgatacaaccataaaacgataattacacccataaatggatcattatcacacccaatttaactataacgctctgatcatagtcagaccaacattgctacgacccgtattcgcaccgacac

SEQ ID NO: 2239 - DNA, 127 bp, synthetic construct
  source 1..127: mol_type = other DNA
acatttgttgatacaaccataaaacgataattacacccataaattcatcattatcacacccaatttaactataacgctctgatcatagtcagaccaacattgctacgacccgtattcgcaccgacac

SEQ ID NO: 2240 - DNA, 127 bp, synthetic construct
  source 1..127: mol_type = other DNA
acatttgtcgatacaaccataaaacgataattacacccataaatggatcattatcacacccaatttaactataacgctctgatcatagtcagaccaacattgctacgacccgtattcgcaccgacac

SEQ ID NO: 2241 - DNA, 127 bp, synthetic construct
  source 1..127: mol_type = other DNA
acatttgtcgatacaaccataaaacgataattacacccataaattcatcattatcacacccaatttaactataacgctctgatcatagtcagaccaacattgctacgacccgtattcgcaccgacac

SEQ ID NO: 2242 - DNA, 127 bp, synthetic construct
  source 1..127: mol_type = other DNA
acatttgtggatacaaccataaaacgataattacacccataaatggatcattatcacacccaatttaactataacgctctgatcatagtcagaccaacattgctacgacccgtattcgcaccgacac

SEQ ID NO: 2243 - DNA, 127 bp, synthetic construct
  source 1..127: mol_type = other DNA
acatttgtggatacaaccataaaacgataattacacccataaattcatcattatcacacccaatttaactataacgctctgatcatagtcagaccaacattgctacgacccgtattcgcaccgacac

SEQ ID NO: 2244 - DNA, 127 bp, synthetic construct
  source 1..127: mol_type = other DNA
acatttgttcatacaaccataaaacgataattacacccataaatggatcattatcacacccaatttaactataacgctctgatcatagtcagaccaacattgctacgacccgtattcgcaccgacac

SEQ ID NO: 2245 - DNA, 127 bp, synthetic construct
  source 1..127: mol_type = other DNA
acatttgttcatacaaccataaaacgataattacacccataaattcatcattatcacacccaatttaactataacgctctgatcatagtcagaccaacattgctacgacccgtattcgcaccgacac

SEQ ID NO: 2246 - DNA, 127 bp, synthetic construct
  source 1..127: mol_type = other DNA
acatttgttgatccaaccataaaatgataattacacccataaattgataattatcacacccaatttaactataacgctctgatcatagtcagaccaacattgctacgacccgtattcgcaccgacac

SEQ ID NO: 2247 - DNA, 127 bp, synthetic construct
  source 1..127: mol_type = other DNA
acatttgtcgatccaaccataaaatgataattacacccataaattgataattatcacacccaatttaactataacgctctgatcatagtcagaccaacattgctacgacccgtattcgcaccgacac

SEQ ID NO: 2248 - DNA, 127 bp, synthetic construct
  source 1..127: mol_type = other DNA
acatttgtggatccaaccataaaatgataattacacccataaattgataattatcacacccaatttaactataacgctctgatcatagtcagaccaacattgctacgacccgtattcgcaccgacac

SEQ ID NO: 2249 - DNA, 127 bp, synthetic construct
  source 1..127: mol_type = other DNA
acatttgttcatccaaccataaaatgataattacacccataaattgataattatcacacccaatttaactataacgctctgatcatagtcagaccaacattgctacgacccgtattcgcaccgacac

SEQ ID NO: 2250 - DNA, 127 bp, synthetic construct
  source 1..127: mol_type = other DNA
acatttgttgatccaaccataaaatgataattacacccataaatggataattatcacacccaatttaactataacgctctgatcatagtcagaccaacattgctacgacccgtattcgcaccgacac

SEQ ID NO: 2251 - DNA, 127 bp, synthetic construct
  source 1..127: mol_type = other DNA
acatttgttgatccaaccataaaatgataattacacccataaattcataattatcacacccaatttaactataacgctctgatcatagtcagaccaacattgctacgacccgtattcgcaccgacac

SEQ ID NO: 2252 - DNA, 127 bp, synthetic construct
  source 1..127: mol_type = other DNA
acatttgtcgatccaaccataaaatgataattacacccataaatggataattatcacacccaatttaactataacgctctgatcatagtcagaccaacattgctacgacccgtattcgcaccgacac

SEQ ID NO: 2253 - DNA, 127 bp, synthetic construct
  source 1..127: mol_type = other DNA
acatttgtcgatccaaccataaaatgataattacacccataaattcataattatcacacccaatttaactataacgctctgatcatagtcagaccaacattgctacgacccgtattcgcaccgacac

SEQ ID NO: 2254 - DNA, 127 bp, synthetic construct
  source 1..127: mol_type = other DNA
acatttgtggatccaaccataaaatgataattacacccataaatggataattatcacacccaatttaactataacgctctgatcatagtcagaccaacattgctacgacccgtattcgcaccgacac

SEQ ID NO: 2255 - DNA, 127 bp, synthetic construct
  source 1..127: mol_type = other DNA
acatttgtggatccaaccataaaatgataattacacccataaattcataattatcacacccaatttaactataacgctctgatcatagtcagaccaacattgctacgacccgtattcgcaccgacac

SEQ ID NO: 2256 - DNA, 127 bp, synthetic construct
  source 1..127: mol_type = other DNA
acatttgttcatccaaccataaaatgataattacacccataaatggataattatcacacccaatttaactataacgctctgatcatagtcagaccaacattgctacgacccgtattcgcaccgacac

SEQ ID NO: 2257 - DNA, 127 bp, synthetic construct
  source 1..127: mol_type = other DNA
acatttgttcatccaaccataaaatgataattacacccataaattcataattatcacacccaatttaactataacgctctgatcatagtcagaccaacattgctacgacccgtattcgcaccgacac

SEQ ID NO: 2258 - DNA, 127 bp, synthetic construct
  source 1..127: mol_type = other DNA
acatttgttgatccaaccataaaatgataattacacccataaattgatcattatcacacccaatttaactataacgctctgatcatagtcagaccaacattgctacgacccgtattcgcaccgacac

SEQ ID NO: 2259 - DNA, 127 bp, synthetic construct
  source 1..127: mol_type = other DNA
acatttgtcgatccaaccataaaatgataattacacccataaattgatcattatcacacccaatttaactataacgctctgatcatagtcagaccaacattgctacgacccgtattcgcaccgacac

SEQ ID NO: 2260 - DNA, 127 bp, synthetic construct
  source 1..127: mol_type = other DNA
acatttgtggatccaaccataaaatgataattacacccataaattgatcattatcacacccaatttaactataacgctctgatcatagtcagaccaacattgctacgacccgtattcgcaccgacac

SEQ ID NO: 2261 - DNA, 127 bp, synthetic construct
  source 1..127: mol_type = other DNA
acatttgttcatccaaccataaaatgataattacacccataaattgatcattatcacacccaatttaactataacgctctgatcatagtcagaccaacattgctacgacccgtattcgcaccgacac

SEQ ID NO: 2262 - DNA, 127 bp, synthetic construct
  source 1..127: mol_type = other DNA
acatttgttgatccaaccataaaatgataattacacccataaatggatcattatcacacccaatttaactataacgctctgatcatagtcagaccaacattgctacgacccgtattcgcaccgacac

SEQ ID NO: 2263 - DNA, 127 bp, synthetic construct
  source 1..127: mol_type = other DNA
acatttgttgatccaaccataaaatgataattacacccataaattcatcattatcacacccaatttaactataacgctctgatcatagtcagaccaacattgctacgacccgtattcgcaccgacac

SEQ ID NO: 2264 - DNA, 127 bp, synthetic construct
  source 1..127: mol_type = other DNA
acatttgtcgatccaaccataaaatgataattacacccataaatggatcattatcacacccaatttaactataacgctctgatcatagtcagaccaacattgctacgacccgtattcgcaccgacac

SEQ ID NO: 2265 - DNA, 127 bp, synthetic construct
  source 1..127: mol_type = other DNA
acatttgtcgatccaaccataaaatgataattacacccataaattcatcattatcacacccaatttaactataacgctctgatcatagtcagaccaacattgctacgacccgtattcgcaccgacac

SEQ ID NO: 2266 - DNA, 127 bp, synthetic construct
  source 1..127: mol_type = other DNA
acatttgtggatccaaccataaaatgataattacacccataaatggatcattatcacacccaatttaactataacgctctgatcatagtcagaccaacattgctacgacccgtattcgcaccgacac

SEQ ID NO: 2267 - DNA, 127 bp, synthetic construct
  source 1..127: mol_type = other DNA
acatttgtggatccaaccataaaatgataattacacccataaattcatcattatcacacccaatttaactataacgctctgatcatagtcagaccaacattgctacgacccgtattcgcaccgacac

SEQ ID NO: 2268 - DNA, 127 bp, synthetic construct
  source 1..127: mol_type = other DNA
acatttgttcatccaaccataaaatgataattacacccataaatggatcattatcacacccaatttaactataacgctctgatcatagtcagaccaacattgctacgacccgtattcgcaccgacac

SEQ ID NO: 2269 - DNA, 127 bp, synthetic construct
  source 1..127: mol_type = other DNA
acatttgttcatccaaccataaaatgataattacacccataaattcatcattatcacacccaatttaactataacgctctgatcatagtcagaccaacattgctacgacccgtattcgcaccgacac

SEQ ID NO: 2270 - DNA, 127 bp, synthetic construct
  source 1..127: mol_type = other DNA
acatttgttgatacaaccataaaatgataattcacccataaattgataattatcacaccccaatttaactataacgctctgatcatagtcagaccaacattgctacgacccgtattcgcaccgacac

SEQ ID NO: 2271 - DNA, 127 bp, synthetic construct
  source 1..127: mol_type = other DNA
acatttgttgatacaaccataaaatgataattcacccatcaattgataattatcacaccccaatttaactataacgctctgatcatagtcagaccaacattgctacgacccgtattcgcaccgacac

SEQ ID NO: 2272 - DNA, 127 bp, synthetic construct
  source 1..127: mol_type = other DNA
acatttgttcatacaaccataaaatgataattcacccataaattgataattatcacaccccaatttaactataacgctctgatcatagtcagaccaacattgctacgacccgtattcgcaccgacac

SEQ ID NO: 2273 - DNA, 127 bp, synthetic construct
  source 1..127: mol_type = other DNA
acatttgttcatacaaccataaaatgataattcacccatcaattgataattatcacaccccaatttaactataacgctctgatcatagtcagaccaacattgctacgacccgtattcgcaccgacac

SEQ ID NO: 2274 - DNA, 127 bp, synthetic construct
  source 1..127: mol_type = other DNA
acatttgtggatacaaccataaaatgataattcacccataaattgataattatcacaccccaatttaactataacgctctgatcatagtcagaccaacattgctacgacccgtattcgcaccgacac

SEQ ID NO: 2275 - DNA, 127 bp, synthetic construct
  source 1..127: mol_type = other DNA
acatttgtggatacaaccataaaatgataattcacccatcaattgataattatcacaccccaatttaactataacgctctgatcatagtcagaccaacattgctacgacccgtattcgcaccgacac

SEQ ID NO: 2276 - DNA, 127 bp, synthetic construct
  source 1..127: mol_type = other DNA
acatttgtcgatacaaccataaaatgataattcacccataaattgataattatcacaccccaatttaactataacgctctgatcatagtcagaccaacattgctacgacccgtattcgcaccgacac

SEQ ID NO: 2277 - DNA, 127 bp, synthetic construct
  source 1..127: mol_type = other DNA
acatttgtcgatacaaccataaaatgataattcacccatcaattgataattatcacaccccaatttaactataacgctctgatcatagtcagaccaacattgctacgacccgtattcgcaccgacac

SEQ ID NO: 2278 - DNA, 127 bp, synthetic construct
  source 1..127: mol_type = other DNA
acatttgttgatacaaccataaaatgataattaccacccataaattgataattatcacacccatttaactataacgctctgatcatagtcagaccaacattgctacgacccgtattcgcaccgacac

SEQ ID NO: 2279 - DNA, 127 bp, synthetic construct
  source 1..127: mol_type = other DNA
acatttgttgatacaaccataaaatgataattaccacccctaaattgataattatcacacccatttaactataacgctctgatcatagtcagaccaacattgctacgacccgtattcgcaccgacac

SEQ ID NO: 2280 - DNA, 127 bp, synthetic construct
  source 1..127: mol_type = other DNA
acatttgttgatacaaccataaaatgataattaccacccatacattgataattatcacacccatttaactataacgctctgatcatagtcagaccaacattgctacgacccgtattcgcaccgacac

SEQ ID NO: 2281 - DNA, 127 bp, synthetic construct
  source 1..127: mol_type = other DNA
acatttgttgatacaaccataaaatgataattaccacccctacattgataattatcacacccatttaactataacgctctgatcatagtcagaccaacattgctacgacccgtattcgcaccgacac

SEQ ID NO: 2282 - DNA, 127 bp, synthetic construct
  source 1..127: mol_type = other DNA
acatttgttcatacaaccataaaatgataattaccacccataaattgataattatcacacccatttaactataacgctctgatcatagtcagaccaacattgctacgacccgtattcgcaccgacac

SEQ ID NO: 2283 - DNA, 127 bp, synthetic construct
  source 1..127: mol_type = other DNA
acatttgttcatacaaccataaaatgataattaccacccctaaattgataattatcacacccatttaactataacgctctgatcatagtcagaccaacattgctacgacccgtattcgcaccgacac

SEQ ID NO: 2284 - DNA, 127 bp, synthetic construct
  source 1..127: mol_type = other DNA
acatttgttcatacaaccataaaatgataattaccacccatacattgataattatcacacccatttaactataacgctctgatcatagtcagaccaacattgctacgacccgtattcgcaccgacac

SEQ ID NO: 2285 - DNA, 127 bp, synthetic construct
  source 1..127: mol_type = other DNA
acatttgttcatacaaccataaaatgataattaccacccctacattgataattatcacacccatttaactataacgctctgatcatagtcagaccaacattgctacgacccgtattcgcaccgacac

SEQ ID NO: 2286 - DNA, 127 bp, synthetic construct
  source 1..127: mol_type = other DNA
acatttgtggatacaaccataaaatgataattaccacccataaattgataattatcacacccatttaactataacgctctgatcatagtcagaccaacattgctacgacccgtattcgcaccgacac

SEQ ID NO: 2287 - DNA, 127 bp, synthetic construct
  source 1..127: mol_type = other DNA
acatttgtggatacaaccataaaatgataattaccacccctaaattgataattatcacacccatttaactataacgctctgatcatagtcagaccaacattgctacgacccgtattcgcaccgacac

SEQ ID NO: 2288 - DNA, 127 bp, synthetic construct
  source 1..127: mol_type = other DNA
acatttgtggatacaaccataaaatgataattaccacccatacattgataattatcacacccatttaactataacgctctgatcatagtcagaccaacattgctacgacccgtattcgcaccgacac

SEQ ID NO: 2289 - DNA, 127 bp, synthetic construct
  source 1..127: mol_type = other DNA
acatttgtggatacaaccataaaatgataattaccacccctacattgataattatcacacccatttaactataacgctctgatcatagtcagaccaacattgctacgacccgtattcgcaccgacac

SEQ ID NO: 2290 - DNA, 127 bp, synthetic construct
  source 1..127: mol_type = other DNA
acatttgtcgatacaaccataaaatgataattaccacccataaattgataattatcacacccatttaactataacgctctgatcatagtcagaccaacattgctacgacccgtattcgcaccgacac

SEQ ID NO: 2291 - DNA, 127 bp, synthetic construct
  source 1..127: mol_type = other DNA
acatttgtcgatacaaccataaaatgataattaccacccctaaattgataattatcacacccatttaactataacgctctgatcatagtcagaccaacattgctacgacccgtattcgcaccgacac

SEQ ID NO: 2292 - DNA, 127 bp, synthetic construct
  source 1..127: mol_type = other DNA
acatttgtcgatacaaccataaaatgataattaccacccatacattgataattatcacacccatttaactataacgctctgatcatagtcagaccaacattgctacgacccgtattcgcaccgacac

SEQ ID NO: 2293 - DNA, 127 bp, synthetic construct
  source 1..127: mol_type = other DNA
acatttgtcgatacaaccataaaatgataattaccacccctacattgataattatcacacccatttaactataacgctctgatcatagtcagaccaacattgctacgacccgtattcgcaccgacac

SEQ ID NO: 2294 - DNA, 127 bp, synthetic construct
  source 1..127: mol_type = other DNA
acatttgttgatacaaccataaaaggataattacacccataaattgataattatcacacccaatttaactataacgctctgatcatagtcagaccaacattgctacgacccgtattcgcaccgacac

SEQ ID NO: 2295 - DNA, 127 bp, synthetic construct
  source 1..127: mol_type = other DNA
acatttgttgatacaaccataaaatcataattacacccataaattgataattatcacacccaatttaactataacgctctgatcatagtcagaccaacattgctacgacccgtattcgcaccgacac

SEQ ID NO: 2296 - DNA, 127 bp, synthetic construct
  source 1..127: mol_type = other DNA
acatttgttgatacaaccataaaatgatcattacacccataaattgataattatcacacccaatttaactataacgctctgatcatagtcagaccaacattgctacgacccgtattcgcaccgacac

SEQ ID NO: 2297 - DNA, 127 bp, synthetic construct
  source 1..127: mol_type = other DNA
acatttgttgatacaaccataaaaggatcattacacccataaattgataattatcacacccaatttaactataacgctctgatcatagtcagaccaacattgctacgacccgtattcgcaccgacac

SEQ ID NO: 2298 - DNA, 127 bp, synthetic construct
  source 1..127: mol_type = other DNA
acatttgttgatacaaccataaaatcatcattacacccataaattgataattatcacacccaatttaactataacgctctgatcatagtcagaccaacattgctacgacccgtattcgcaccgacac

SEQ ID NO: 2299 - DNA, 127 bp, synthetic construct
  source 1..127: mol_type = other DNA
acatttgttgatacaaccataaaatgataattacacccatcaattgataattatcacacccaatttaactataacgctctgatcatagtcagaccaacattgctacgacccgtattcgcaccgacac

SEQ ID NO: 2300 - DNA, 127 bp, synthetic construct
  source 1..127: mol_type = other DNA
acatttgttgatacaaccataaaaggataattacacccatcaattgataattatcacacccaatttaactataacgctctgatcatagtcagaccaacattgctacgacccgtattcgcaccgacac

SEQ ID NO: 2301 - DNA, 127 bp, synthetic construct
  source 1..127: mol_type = other DNA
acatttgttgatacaaccataaaatcataattacacccatcaattgataattatcacacccaatttaactataacgctctgatcatagtcagaccaacattgctacgacccgtattcgcaccgacac

SEQ ID NO: 2302 - DNA, 127 bp, synthetic construct
  source 1..127: mol_type = other DNA
acatttgttgatacaaccataaaatgatcattacacccatcaattgataattatcacacccaatttaactataacgctctgatcatagtcagaccaacattgctacgacccgtattcgcaccgacac

SEQ ID NO: 2303 - DNA, 127 bp, synthetic construct
  source 1..127: mol_type = other DNA
acatttgttgatacaaccataaaaggatcattacacccatcaattgataattatcacacccaatttaactataacgctctgatcatagtcagaccaacattgctacgacccgtattcgcaccgacac

SEQ ID NO: 2304 - DNA, 127 bp, synthetic construct
  source 1..127: mol_type = other DNA
acatttgttgatacaaccataaaatcatcattacacccatcaattgataattatcacacccaatttaactataacgctctgatcatagtcagaccaacattgctacgacccgtattcgcaccgacac

SEQ ID NO: 2305 - DNA, 127 bp, synthetic construct
  source 1..127: mol_type = other DNA
acatttgttgatacaaccataaaatgataattacccccataaattgataattatcacacccaatttaactataacgctctgatcatagtcagaccaacattgctacgacccgtattcgcaccgacac

SEQ ID NO: 2306 - DNA, 127 bp, synthetic construct
  source 1..127: mol_type = other DNA
acatttgttgatacaaccataaaaggataattacccccataaattgataattatcacacccaatttaactataacgctctgatcatagtcagaccaacattgctacgacccgtattcgcaccgacac

SEQ ID NO: 2307 - DNA, 127 bp, synthetic construct
  source 1..127: mol_type = other DNA
acatttgttgatacaaccataaaatcataattacccccataaattgataattatcacacccaatttaactataacgctctgatcatagtcagaccaacattgctacgacccgtattcgcaccgacac

SEQ ID NO: 2308 - DNA, 127 bp, synthetic construct
  source 1..127: mol_type = other DNA
acatttgttgatacaaccataaaatgatcattacccccataaattgataattatcacacccaatttaactataacgctctgatcatagtcagaccaacattgctacgacccgtattcgcaccgacac

SEQ ID NO: 2309 - DNA, 127 bp, synthetic construct
  source 1..127: mol_type = other DNA
acatttgttgatacaaccataaaaggatcattacccccataaattgataattatcacacccaatttaactataacgctctgatcatagtcagaccaacattgctacgacccgtattcgcaccgacac

SEQ ID NO: 2310 - DNA, 127 bp, synthetic construct
  source 1..127: mol_type = other DNA
acatttgttgatacaaccataaaatcatcattacccccataaattgataattatcacacccaatttaactataacgctctgatcatagtcagaccaacattgctacgacccgtattcgcaccgacac

SEQ ID NO: 2311 - DNA, 127 bp, synthetic construct
  source 1..127: mol_type = other DNA
acatttgttgatacaaccataaaatgataattacccccatcaattgataattatcacacccaatttaactataacgctctgatcatagtcagaccaacattgctacgacccgtattcgcaccgacac

SEQ ID NO: 2312 - DNA, 127 bp, synthetic construct
  source 1..127: mol_type = other DNA
acatttgttgatacaaccataaaaggataattacccccatcaattgataattatcacacccaatttaactataacgctctgatcatagtcagaccaacattgctacgacccgtattcgcaccgacac

SEQ ID NO: 2313 - DNA, 127 bp, synthetic construct
  source 1..127: mol_type = other DNA
acatttgttgatacaaccataaaatcataattacccccatcaattgataattatcacacccaatttaactataacgctctgatcatagtcagaccaacattgctacgacccgtattcgcaccgacac

SEQ ID NO: 2314 - DNA, 127 bp, synthetic construct
  source 1..127: mol_type = other DNA
acatttgttgatacaaccataaaatgatcattacccccatcaattgataattatcacacccaatttaactataacgctctgatcatagtcagaccaacattgctacgacccgtattcgcaccgacac

SEQ ID NO: 2315 - DNA, 127 bp, synthetic construct
  source 1..127: mol_type = other DNA
acatttgttgatacaaccataaaaggatcattacccccatcaattgataattatcacacccaatttaactataacgctctgatcatagtcagaccaacattgctacgacccgtattcgcaccgacac

SEQ ID NO: 2316 - DNA, 127 bp, synthetic construct
  source 1..127: mol_type = other DNA
acatttgttgatacaaccataaaatcatcattacccccatcaattgataattatcacacccaatttaactataacgctctgatcatagtcagaccaacattgctacgacccgtattcgcaccgacac

SEQ ID NO: 2317 - DNA, 127 bp, synthetic construct
  source 1..127: mol_type = other DNA
acatttgttgatacaaccataaaatgataattacacccataaattgataattatcccacccaatttaactataacgctctgatcatagtcagaccaacattgctacgacccgtattcgcaccgacac

SEQ ID NO: 2318 - DNA, 127 bp, synthetic construct
  source 1..127: mol_type = other DNA
acatttgttgatacaaccataaaaggataattacacccataaattgataattatcccacccaatttaactataacgctctgatcatagtcagaccaacattgctacgacccgtattcgcaccgacac

SEQ ID NO: 2319 - DNA, 127 bp, synthetic construct
  source 1..127: mol_type = other DNA
acatttgttgatacaaccataaaatcataattacacccataaattgataattatcccacccaatttaactataacgctctgatcatagtcagaccaacattgctacgacccgtattcgcaccgacac

SEQ ID NO: 2320 - DNA, 127 bp, synthetic construct
  source 1..127: mol_type = other DNA
acatttgttgatacaaccataaaatgatcattacacccataaattgataattatcccacccaatttaactataacgctctgatcatagtcagaccaacattgctacgacccgtattcgcaccgacac

SEQ ID NO: 2321 - DNA, 127 bp, synthetic construct
  source 1..127: mol_type = other DNA
acatttgttgatacaaccataaaaggatcattacacccataaattgataattatcccacccaatttaactataacgctctgatcatagtcagaccaacattgctacgacccgtattcgcaccgacac

SEQ ID NO: 2322 - DNA, 127 bp, synthetic construct
  source 1..127: mol_type = other DNA
acatttgttgatacaaccataaaatcatcattacacccataaattgataattatcccacccaatttaactataacgctctgatcatagtcagaccaacattgctacgacccgtattcgcaccgacac

SEQ ID NO: 2323 - DNA, 127 bp, synthetic construct
  source 1..127: mol_type = other DNA
acatttgttgatacaaccataaaatgataattacacccatcaattgataattatcccacccaatttaactataacgctctgatcatagtcagaccaacattgctacgacccgtattcgcaccgacac

SEQ ID NO: 2324 - DNA, 127 bp, synthetic construct
  source 1..127: mol_type = other DNA
acatttgttgatacaaccataaaaggataattacacccatcaattgataattatcccacccaatttaactataacgctctgatcatagtcagaccaacattgctacgacccgtattcgcaccgacac

SEQ ID NO: 2325 - DNA, 127 bp, synthetic construct
  source 1..127: mol_type = other DNA
acatttgttgatacaaccataaaatcataattacacccatcaattgataattatcccacccaatttaactataacgctctgatcatagtcagaccaacattgctacgacccgtattcgcaccgacac

SEQ ID NO: 2326 - DNA, 127 bp, synthetic construct
  source 1..127: mol_type = other DNA
acatttgttgatacaaccataaaatgatcattacacccatcaattgataattatcccacccaatttaactataacgctctgatcatagtcagaccaacattgctacgacccgtattcgcaccgacac

SEQ ID NO: 2327 - DNA, 127 bp, synthetic construct
  source 1..127: mol_type = other DNA
acatttgttgatacaaccataaaaggatcattacacccatcaattgataattatcccacccaatttaactataacgctctgatcatagtcagaccaacattgctacgacccgtattcgcaccgacac

SEQ ID NO: 2328 - DNA, 127 bp, synthetic construct
  source 1..127: mol_type = other DNA
acatttgttgatacaaccataaaatcatcattacacccatcaattgataattatcccacccaatttaactataacgctctgatcatagtcagaccaacattgctacgacccgtattcgcaccgacac

SEQ ID NO: 2329 - DNA, 127 bp, synthetic construct
  source 1..127: mol_type = other DNA
acatttgttgatacaaccataaaatgataattacacccataaattgataattatcacaccccatttaactataacgctctgatcatagtcagaccaacattgctacgacccgtattcgcaccgacac

SEQ ID NO: 2330 - DNA, 127 bp, synthetic construct
  source 1..127: mol_type = other DNA
acatttgttgatacaaccataaaaggataattacacccataaattgataattatcacaccccatttaactataacgctctgatcatagtcagaccaacattgctacgacccgtattcgcaccgacac

SEQ ID NO: 2331 - DNA, 127 bp, synthetic construct
  source 1..127: mol_type = other DNA
acatttgttgatacaaccataaaatcataattacacccataaattgataattatcacaccccatttaactataacgctctgatcatagtcagaccaacattgctacgacccgtattcgcaccgacac

SEQ ID NO: 2332 - DNA, 127 bp, synthetic construct
  source 1..127: mol_type = other DNA
acatttgttgatacaaccataaaatgatcattacacccataaattgataattatcacaccccatttaactataacgctctgatcatagtcagaccaacattgctacgacccgtattcgcaccgacac

SEQ ID NO: 2333 - DNA, 127 bp, synthetic construct
  source 1..127: mol_type = other DNA
acatttgttgatacaaccataaaaggatcattacacccataaattgataattatcacaccccatttaactataacgctctgatcatagtcagaccaacattgctacgacccgtattcgcaccgacac

SEQ ID NO: 2334 - DNA, 127 bp, synthetic construct
  source 1..127: mol_type = other DNA
acatttgttgatacaaccataaaatcatcattacacccataaattgataattatcacaccccatttaactataacgctctgatcatagtcagaccaacattgctacgacccgtattcgcaccgacac

SEQ ID NO: 2335 - DNA, 127 bp, synthetic construct
  source 1..127: mol_type = other DNA
acatttgttgatacaaccataaaatgataattacacccatcaattgataattatcacaccccatttaactataacgctctgatcatagtcagaccaacattgctacgacccgtattcgcaccgacac

SEQ ID NO: 2336 - DNA, 127 bp, synthetic construct
  source 1..127: mol_type = other DNA
acatttgttgatacaaccataaaaggataattacacccatcaattgataattatcacaccccatttaactataacgctctgatcatagtcagaccaacattgctacgacccgtattcgcaccgacac

SEQ ID NO: 2337 - DNA, 127 bp, synthetic construct
  source 1..127: mol_type = other DNA
acatttgttgatacaaccataaaatcataattacacccatcaattgataattatcacaccccatttaactataacgctctgatcatagtcagaccaacattgctacgacccgtattcgcaccgacac

SEQ ID NO: 2338 - DNA, 127 bp, synthetic construct
  source 1..127: mol_type = other DNA
acatttgttgatacaaccataaaatgatcattacacccatcaattgataattatcacaccccatttaactataacgctctgatcatagtcagaccaacattgctacgacccgtattcgcaccgacac

SEQ ID NO: 2339 - DNA, 127 bp, synthetic construct
  source 1..127: mol_type = other DNA
acatttgttgatacaaccataaaaggatcattacacccatcaattgataattatcacaccccatttaactataacgctctgatcatagtcagaccaacattgctacgacccgtattcgcaccgacac

SEQ ID NO: 2340 - DNA, 127 bp, synthetic construct
  source 1..127: mol_type = other DNA
acatttgttgatacaaccataaaatcatcattacacccatcaattgataattatcacaccccatttaactataacgctctgatcatagtcagaccaacattgctacgacccgtattcgcaccgacac

SEQ ID NO: 2341 - DNA, 127 bp, synthetic construct
  source 1..127: mol_type = other DNA
acatttgttgatacaaccataaaatgataattacccccataaattgataattatcccacccaatttaactataacgctctgatcatagtcagaccaacattgctacgacccgtattcgcaccgacac

SEQ ID NO: 2342 - DNA, 127 bp, synthetic construct
  source 1..127: mol_type = other DNA
acatttgttgatacaaccataaaaggataattacccccataaattgataattatcccacccaatttaactataacgctctgatcatagtcagaccaacattgctacgacccgtattcgcaccgacac

SEQ ID NO: 2343 - DNA, 127 bp, synthetic construct
  source 1..127: mol_type = other DNA
acatttgttgatacaaccataaaatcataattacccccataaattgataattatcccacccaatttaactataacgctctgatcatagtcagaccaacattgctacgacccgtattcgcaccgacac

SEQ ID NO: 2344 - DNA, 127 bp, synthetic construct
  source 1..127: mol_type = other DNA
acatttgttgatacaaccataaaatgatcattacccccataaattgataattatcccacccaatttaactataacgctctgatcatagtcagaccaacattgctacgacccgtattcgcaccgacac

SEQ ID NO: 2345 - DNA, 127 bp, synthetic construct
  source 1..127: mol_type = other DNA
acatttgttgatacaaccataaaaggatcattacccccataaattgataattatcccacccaatttaactataacgctctgatcatagtcagaccaacattgctacgacccgtattcgcaccgacac

SEQ ID NO: 2346 - DNA, 127 bp, synthetic construct
  source 1..127: mol_type = other DNA
acatttgttgatacaaccataaaatcatcattacccccataaattgataattatcccacccaatttaactataacgctctgatcatagtcagaccaacattgctacgacccgtattcgcaccgacac

SEQ ID NO: 2347 - DNA, 127 bp, synthetic construct
  source 1..127: mol_type = other DNA
acatttgttgatacaaccataaaatgataattacccccatcaattgataattatcccacccaatttaactataacgctctgatcatagtcagaccaacattgctacgacccgtattcgcaccgacac

SEQ ID NO: 2348 - DNA, 127 bp, synthetic construct
  source 1..127: mol_type = other DNA
acatttgttgatacaaccataaaaggataattacccccatcaattgataattatcccacccaatttaactataacgctctgatcatagtcagaccaacattgctacgacccgtattcgcaccgacac

SEQ ID NO: 2349 - DNA, 127 bp, synthetic construct
  source 1..127: mol_type = other DNA
acatttgttgatacaaccataaaatcataattacccccatcaattgataattatcccacccaatttaactataacgctctgatcatagtcagaccaacattgctacgacccgtattcgcaccgacac

SEQ ID NO: 2350 - DNA, 127 bp, synthetic construct
  source 1..127: mol_type = other DNA
acatttgttgatacaaccataaaatgatcattacccccatcaattgataattatcccacccaatttaactataacgctctgatcatagtcagaccaacattgctacgacccgtattcgcaccgacac

SEQ ID NO: 2351 - DNA, 127 bp, synthetic construct
  source 1..127: mol_type = other DNA
acatttgttgatacaaccataaaaggatcattacccccatcaattgataattatcccacccaatttaactataacgctctgatcatagtcagaccaacattgctacgacccgtattcgcaccgacac

SEQ ID NO: 2352 - DNA, 127 bp, synthetic construct
  source 1..127: mol_type = other DNA
acatttgttgatacaaccataaaatcatcattacccccatcaattgataattatcccacccaatttaactataacgctctgatcatagtcagaccaacattgctacgacccgtattcgcaccgacac

SEQ ID NO: 2353 - DNA, 127 bp, synthetic construct
  source 1..127: mol_type = other DNA
acatttgttgatacaaccataaaatgataattacccccataaattgataattatcacaccccatttaactataacgctctgatcatagtcagaccaacattgctacgacccgtattcgcaccgacac

SEQ ID NO: 2354 - DNA, 127 bp, synthetic construct
  source 1..127: mol_type = other DNA
acatttgttgatacaaccataaaaggataattacccccataaattgataattatcacaccccatttaactataacgctctgatcatagtcagaccaacattgctacgacccgtattcgcaccgacac

SEQ ID NO: 2355 - DNA, 127 bp, synthetic construct
  source 1..127: mol_type = other DNA
acatttgttgatacaaccataaaatcataattacccccataaattgataattatcacaccccatttaactataacgctctgatcatagtcagaccaacattgctacgacccgtattcgcaccgacac

SEQ ID NO: 2356 - DNA, 127 bp, synthetic construct
  source 1..127: mol_type = other DNA
acatttgttgatacaaccataaaatgatcattacccccataaattgataattatcacaccccatttaactataacgctctgatcatagtcagaccaacattgctacgacccgtattcgcaccgacac

SEQ ID NO: 2357 - DNA, 127 bp, synthetic construct
  source 1..127: mol_type = other DNA
acatttgttgatacaaccataaaaggatcattacccccataaattgataattatcacaccccatttaactataacgctctgatcatagtcagaccaacattgctacgacccgtattcgcaccgacac

SEQ ID NO: 2358 - DNA, 127 bp, synthetic construct
  source 1..127: mol_type = other DNA
acatttgttgatacaaccataaaatcatcattacccccataaattgataattatcacaccccatttaactataacgctctgatcatagtcagaccaacattgctacgacccgtattcgcaccgacac

SEQ ID NO: 2359 - DNA, 127 bp, synthetic construct
  source 1..127: mol_type = other DNA
acatttgttgatacaaccataaaatgataattacccccatcaattgataattatcacaccccatttaactataacgctctgatcatagtcagaccaacattgctacgacccgtattcgcaccgacac

SEQ ID NO: 2360 - DNA, 127 bp, synthetic construct
  source 1..127: mol_type = other DNA
acatttgttgatacaaccataaaaggataattacccccatcaattgataattatcacaccccatttaactataacgctctgatcatagtcagaccaacattgctacgacccgtattcgcaccgacac

SEQ ID NO: 2361 - DNA, 127 bp, synthetic construct
  source 1..127: mol_type = other DNA
acatttgttgatacaaccataaaatcataattacccccatcaattgataattatcacaccccatttaactataacgctctgatcatagtcagaccaacattgctacgacccgtattcgcaccgacac

SEQ ID NO: 2362 - DNA, 127 bp, synthetic construct
  source 1..127: mol_type = other DNA
acatttgttgatacaaccataaaatgatcattacccccatcaattgataattatcacaccccatttaactataacgctctgatcatagtcagaccaacattgctacgacccgtattcgcaccgacac

SEQ ID NO: 2363 - DNA, 127 bp, synthetic construct
  source 1..127: mol_type = other DNA
acatttgttgatacaaccataaaaggatcattacccccatcaattgataattatcacaccccatttaactataacgctctgatcatagtcagaccaacattgctacgacccgtattcgcaccgacac

SEQ ID NO: 2364 - DNA, 127 bp, synthetic construct
  source 1..127: mol_type = other DNA
acatttgttgatacaaccataaaatcatcattacccccatcaattgataattatcacaccccatttaactataacgctctgatcatagtcagaccaacattgctacgacccgtattcgcaccgacac

SEQ ID NO: 2365 - DNA, 127 bp, synthetic construct
  source 1..127: mol_type = other DNA
acatttgttgatacaaccataaaatgataattacacccataaattgataattatcccaccccatttaactataacgctctgatcatagtcagaccaacattgctacgacccgtattcgcaccgacac

SEQ ID NO: 2366 - DNA, 127 bp, synthetic construct
  source 1..127: mol_type = other DNA
acatttgttgatacaaccataaaaggataattacacccataaattgataattatcccaccccatttaactataacgctctgatcatagtcagaccaacattgctacgacccgtattcgcaccgacac

SEQ ID NO: 2367 - DNA, 127 bp, synthetic construct
  source 1..127: mol_type = other DNA
acatttgttgatacaaccataaaatcataattacacccataaattgataattatcccaccccatttaactataacgctctgatcatagtcagaccaacattgctacgacccgtattcgcaccgacac

SEQ ID NO: 2368 - DNA, 127 bp, synthetic construct
  source 1..127: mol_type = other DNA
acatttgttgatacaaccataaaatgatcattacacccataaattgataattatcccaccccatttaactataacgctctgatcatagtcagaccaacattgctacgacccgtattcgcaccgacac

SEQ ID NO: 2369 - DNA, 127 bp, synthetic construct
  source 1..127: mol_type = other DNA
acatttgttgatacaaccataaaaggatcattacacccataaattgataattatcccaccccatttaactataacgctctgatcatagtcagaccaacattgctacgacccgtattcgcaccgacac

SEQ ID NO: 2370 - DNA, 127 bp, synthetic construct
  source 1..127: mol_type = other DNA
acatttgttgatacaaccataaaatcatcattacacccataaattgataattatcccaccccatttaactataacgctctgatcatagtcagaccaacattgctacgacccgtattcgcaccgacac

SEQ ID NO: 2371 - DNA, 127 bp, synthetic construct
  source 1..127: mol_type = other DNA
acatttgttgatacaaccataaaatgataattacacccatcaattgataattatcccaccccatttaactataacgctctgatcatagtcagaccaacattgctacgacccgtattcgcaccgacac

SEQ ID NO: 2372 - DNA, 127 bp, synthetic construct
  source 1..127: mol_type = other DNA
acatttgttgatacaaccataaaaggataattacacccatcaattgataattatcccaccccatttaactataacgctctgatcatagtcagaccaacattgctacgacccgtattcgcaccgacac

SEQ ID NO: 2373 - DNA, 127 bp, synthetic construct
  source 1..127: mol_type = other DNA
acatttgttgatacaaccataaaatcataattacacccatcaattgataattatcccaccccatttaactataacgctctgatcatagtcagaccaacattgctacgacccgtattcgcaccgacac

SEQ ID NO: 2374 - DNA, 127 bp, synthetic construct
  source 1..127: mol_type = other DNA
acatttgttgatacaaccataaaatgatcattacacccatcaattgataattatcccaccccatttaactataacgctctgatcatagtcagaccaacattgctacgacccgtattcgcaccgacac

SEQ ID NO: 2375 - DNA, 127 bp, synthetic construct
  source 1..127: mol_type = other DNA
acatttgttgatacaaccataaaaggatcattacacccatcaattgataattatcccaccccatttaactataacgctctgatcatagtcagaccaacattgctacgacccgtattcgcaccgacac

SEQ ID NO: 2376 - DNA, 127 bp, synthetic construct
  source 1..127: mol_type = other DNA
acatttgttgatacaaccataaaatcatcattacacccatcaattgataattatcccaccccatttaactataacgctctgatcatagtcagaccaacattgctacgacccgtattcgcaccgacac

SEQ ID NO: 2377 - DNA, 127 bp, synthetic construct
  source 1..127: mol_type = other DNA
acatttgttgatacaaccataaaatgataattacccccataaattgataattatcccaccccatttaactataacgctctgatcatagtcagaccaacattgctacgacccgtattcgcaccgacac

SEQ ID NO: 2378 - DNA, 127 bp, synthetic construct
  source 1..127: mol_type = other DNA
acatttgttgatacaaccataaaaggataattacccccataaattgataattatcccaccccatttaactataacgctctgatcatagtcagaccaacattgctacgacccgtattcgcaccgacac

SEQ ID NO: 2379 - DNA, 127 bp, synthetic construct
  source 1..127: mol_type = other DNA
acatttgttgatacaaccataaaatcataattacccccataaattgataattatcccaccccatttaactataacgctctgatcatagtcagaccaacattgctacgacccgtattcgcaccgacac

SEQ ID NO: 2380 - DNA, 127 bp, synthetic construct
  source 1..127: mol_type = other DNA
acatttgttgatacaaccataaaatgatcattacccccataaattgataattatcccaccccatttaactataacgctctgatcatagtcagaccaacattgctacgacccgtattcgcaccgacac

SEQ ID NO: 2381 - DNA, 127 bp, synthetic construct
  source 1..127: mol_type = other DNA
acatttgttgatacaaccataaaaggatcattacccccataaattgataattatcccaccccatttaactataacgctctgatcatagtcagaccaacattgctacgacccgtattcgcaccgacac

SEQ ID NO: 2382 - DNA, 127 bp, synthetic construct
  source 1..127: mol_type = other DNA
acatttgttgatacaaccataaaatcatcattacccccataaattgataattatcccaccccatttaactataacgctctgatcatagtcagaccaacattgctacgacccgtattcgcaccgacac

SEQ ID NO: 2383 - DNA, 127 bp, synthetic construct
  source 1..127: mol_type = other DNA
acatttgttgatacaaccataaaatgataattacccccatcaattgataattatcccaccccatttaactataacgctctgatcatagtcagaccaacattgctacgacccgtattcgcaccgacac

SEQ ID NO: 2384 - DNA, 127 bp, synthetic construct
  source 1..127: mol_type = other DNA
acatttgttgatacaaccataaaaggataattacccccatcaattgataattatcccaccccatttaactataacgctctgatcatagtcagaccaacattgctacgacccgtattcgcaccgacac

SEQ ID NO: 2385 - DNA, 127 bp, synthetic construct
  source 1..127: mol_type = other DNA
acatttgttgatacaaccataaaatcataattacccccatcaattgataattatcccaccccatttaactataacgctctgatcatagtcagaccaacattgctacgacccgtattcgcaccgacac

SEQ ID NO: 2386 - DNA, 127 bp, synthetic construct
  source 1..127: mol_type = other DNA
acatttgttgatacaaccataaaatgatcattacccccatcaattgataattatcccaccccatttaactataacgctctgatcatagtcagaccaacattgctacgacccgtattcgcaccgacac

SEQ ID NO: 2387 - DNA, 127 bp, synthetic construct
  source 1..127: mol_type = other DNA
acatttgttgatacaaccataaaaggatcattacccccatcaattgataattatcccaccccatttaactataacgctctgatcatagtcagaccaacattgctacgacccgtattcgcaccgacac

SEQ ID NO: 2388 - DNA, 127 bp, synthetic construct
  source 1..127: mol_type = other DNA
acatttgttgatacaaccataaaatcatcattacccccatcaattgataattatcccaccccatttaactataacgctctgatcatagtcagaccaacattgctacgacccgtattcgcaccgacac

SEQ ID NO: 2389 - DNA, 127 bp, synthetic construct
  source 1..127: mol_type = other DNA
acatttgttgatacaaccataaaatgataattacacccataaattgataattctcacacccaatttaactataacgctctgatcatagtcagaccaacattgctacgacccgtattcgcaccgacac

SEQ ID NO: 2390 - DNA, 127 bp, synthetic construct
  source 1..127: mol_type = other DNA
acatttgttgatacaaccataaaatgataattcacccataaattgataattatcacacccacatttaactataacgctctgatcatagtcagaccaacattgctacgacccgtattcgcaccgacac

SEQ ID NO: 2391 - DNA, 127 bp, synthetic construct
  source 1..127: mol_type = other DNA
acatttgttgatacaaccataaaaggataattcacccataaattgataattatcacacccacatttaactataacgctctgatcatagtcagaccaacattgctacgacccgtattcgcaccgacac

SEQ ID NO: 2392 - DNA, 127 bp, synthetic construct
  source 1..127: mol_type = other DNA
acatttgttgatacaaccataaaatcataattcacccataaattgataattatcacacccacatttaactataacgctctgatcatagtcagaccaacattgctacgacccgtattcgcaccgacac

SEQ ID NO: 2393 - DNA, 127 bp, synthetic construct
  source 1..127: mol_type = other DNA
acatttgttgatacaaccataaaatgatcattcacccataaattgataattatcacacccacatttaactataacgctctgatcatagtcagaccaacattgctacgacccgtattcgcaccgacac

SEQ ID NO: 2394 - DNA, 127 bp, synthetic construct
  source 1..127: mol_type = other DNA
acatttgttgatacaaccataaaaggatcattcacccataaattgataattatcacacccacatttaactataacgctctgatcatagtcagaccaacattgctacgacccgtattcgcaccgacac

SEQ ID NO: 2395 - DNA, 127 bp, synthetic construct
  source 1..127: mol_type = other DNA
acatttgttgatacaaccataaaatcatcattcacccataaattgataattatcacacccacatttaactataacgctctgatcatagtcagaccaacattgctacgacccgtattcgcaccgacac

SEQ ID NO: 2396 - DNA, 127 bp, synthetic construct
  source 1..127: mol_type = other DNA
acatttgttgatacaaccataaaatgataattcacccctaaattgataattatcacacccacatttaactataacgctctgatcatagtcagaccaacattgctacgacccgtattcgcaccgacac

SEQ ID NO: 2397 - DNA, 127 bp, synthetic construct
  source 1..127: mol_type = other DNA
acatttgttgatacaaccataaaaggataattcacccctaaattgataattatcacacccacatttaactataacgctctgatcatagtcagaccaacattgctacgacccgtattcgcaccgacac

SEQ ID NO: 2398 - DNA, 127 bp, synthetic construct
  source 1..127: mol_type = other DNA
acatttgttgatacaaccataaaatcataattcacccctaaattgataattatcacacccacatttaactataacgctctgatcatagtcagaccaacattgctacgacccgtattcgcaccgacac

SEQ ID NO: 2399 - DNA, 127 bp, synthetic construct
  source 1..127: mol_type = other DNA
acatttgttgatacaaccataaaatgatcattcacccctaaattgataattatcacacccacatttaactataacgctctgatcatagtcagaccaacattgctacgacccgtattcgcaccgacac

SEQ ID NO: 2400 - DNA, 127 bp, synthetic construct
  source 1..127: mol_type = other DNA
acatttgttgatacaaccataaaaggatcattcacccctaaattgataattatcacacccacatttaactataacgctctgatcatagtcagaccaacattgctacgacccgtattcgcaccgacac

SEQ ID NO: 2401 - DNA, 127 bp, synthetic construct
  source 1..127: mol_type = other DNA
acatttgttgatacaaccataaaatcatcattcacccctaaattgataattatcacacccacatttaactataacgctctgatcatagtcagaccaacattgctacgacccgtattcgcaccgacac

SEQ ID NO: 2402 - DNA, 127 bp, synthetic construct
  source 1..127: mol_type = other DNA
acatttgttgatacaaccatcaaatgataattacacccataaattgataattatcacacccaatttaactataacgctctgatcatagtcagaccaacattgctacgacccgtattcgcaccgacac

SEQ ID NO: 2403 - DNA, 127 bp, synthetic construct
  source 1..127: mol_type = other DNA
acatttgttgatacaaccataaaatgataattacacccctaaattgataattatcacacccaatttaactataacgctctgatcatagtcagaccaacattgctacgacccgtattcgcaccgacac

SEQ ID NO: 2404 - DNA, 127 bp, synthetic construct
  source 1..127: mol_type = other DNA
acatttgttgatacaaccatcaaatgataattacacccctaaattgataattatcacacccaatttaactataacgctctgatcatagtcagaccaacattgctacgacccgtattcgcaccgacac

SEQ ID NO: 2405 - DNA, 127 bp, synthetic construct
  source 1..127: mol_type = other DNA
acatttgttgatacaaccataaaatgataattccacccataaattgataattatcacacccaatttaactataacgctctgatcatagtcagaccaacattgctacgacccgtattcgcaccgacac

SEQ ID NO: 2406 - DNA, 127 bp, synthetic construct
  source 1..127: mol_type = other DNA
acatttgttgatacaaccatcaaatgataattccacccataaattgataattatcacacccaatttaactataacgctctgatcatagtcagaccaacattgctacgacccgtattcgcaccgacac

SEQ ID NO: 2407 - DNA, 127 bp, synthetic construct
  source 1..127: mol_type = other DNA
acatttgttgatacaaccataaaatgataattccacccctaaattgataattatcacacccaatttaactataacgctctgatcatagtcagaccaacattgctacgacccgtattcgcaccgacac

SEQ ID NO: 2408 - DNA, 127 bp, synthetic construct
  source 1..127: mol_type = other DNA
acatttgttgatacaaccatcaaatgataattccacccctaaattgataattatcacacccaatttaactataacgctctgatcatagtcagaccaacattgctacgacccgtattcgcaccgacac

SEQ ID NO: 2409 - DNA, 127 bp, synthetic construct
  source 1..127: mol_type = other DNA
acatttgttgatacaaccataaaatggtaattacacccataaattgataattatcacacccaatttaactataacgctctgatcatagtcagaccaacattgctacgacccgtattcgcaccgacac

SEQ ID NO: 2410 - DNA, 127 bp, synthetic construct
  source 1..127: mol_type = other DNA
acatttgttgatacaaccatcaaatggtaattacacccataaattgataattatcacacccaatttaactataacgctctgatcatagtcagaccaacattgctacgacccgtattcgcaccgacac

SEQ ID NO: 2411 - DNA, 127 bp, synthetic construct
  source 1..127: mol_type = other DNA
acatttgttgatacaaccataaaatggtaattacacccctaaattgataattatcacacccaatttaactataacgctctgatcatagtcagaccaacattgctacgacccgtattcgcaccgacac

SEQ ID NO: 2412 - DNA, 127 bp, synthetic construct
  source 1..127: mol_type = other DNA
acatttgttgatacaaccatcaaatggtaattacacccctaaattgataattatcacacccaatttaactataacgctctgatcatagtcagaccaacattgctacgacccgtattcgcaccgacac

SEQ ID NO: 2413 - DNA, 127 bp, synthetic construct
  source 1..127: mol_type = other DNA
acatttgttgatacaaccataaaatggtaattccacccataaattgataattatcacacccaatttaactataacgctctgatcatagtcagaccaacattgctacgacccgtattcgcaccgacac

SEQ ID NO: 2414 - DNA, 127 bp, synthetic construct
  source 1..127: mol_type = other DNA
acatttgttgatacaaccatcaaatggtaattccacccataaattgataattatcacacccaatttaactataacgctctgatcatagtcagaccaacattgctacgacccgtattcgcaccgacac

SEQ ID NO: 2415 - DNA, 127 bp, synthetic construct
  source 1..127: mol_type = other DNA
acatttgttgatacaaccataaaatggtaattccacccctaaattgataattatcacacccaatttaactataacgctctgatcatagtcagaccaacattgctacgacccgtattcgcaccgacac

SEQ ID NO: 2416 - DNA, 127 bp, synthetic construct
  source 1..127: mol_type = other DNA
acatttgttgatacaaccatcaaatggtaattccacccctaaattgataattatcacacccaatttaactataacgctctgatcatagtcagaccaacattgctacgacccgtattcgcaccgacac

SEQ ID NO: 2417 - DNA, 127 bp, synthetic construct
  source 1..127: mol_type = other DNA
acatttgttgatacaaccataaaatgataattacacccatacattgataattatcacacccaatttaactataacgctctgatcatagtcagaccaacattgctacgacccgtattcgcaccgacac

SEQ ID NO: 2418 - DNA, 127 bp, synthetic construct
  source 1..127: mol_type = other DNA
acatttgttgatacaaccatcaaatgataattacacccatacattgataattatcacacccaatttaactataacgctctgatcatagtcagaccaacattgctacgacccgtattcgcaccgacac

SEQ ID NO: 2419 - DNA, 127 bp, synthetic construct
  source 1..127: mol_type = other DNA
acatttgttgatacaaccataaaatgataattacacccctacattgataattatcacacccaatttaactataacgctctgatcatagtcagaccaacattgctacgacccgtattcgcaccgacac

SEQ ID NO: 2420 - DNA, 127 bp, synthetic construct
  source 1..127: mol_type = other DNA
acatttgttgatacaaccatcaaatgataattacacccctacattgataattatcacacccaatttaactataacgctctgatcatagtcagaccaacattgctacgacccgtattcgcaccgacac

SEQ ID NO: 2421 - DNA, 127 bp, synthetic construct
  source 1..127: mol_type = other DNA
acatttgttgatacaaccataaaatgataattccacccatacattgataattatcacacccaatttaactataacgctctgatcatagtcagaccaacattgctacgacccgtattcgcaccgacac

SEQ ID NO: 2422 - DNA, 127 bp, synthetic construct
  source 1..127: mol_type = other DNA
acatttgttgatacaaccatcaaatgataattccacccatacattgataattatcacacccaatttaactataacgctctgatcatagtcagaccaacattgctacgacccgtattcgcaccgacac

SEQ ID NO: 2423 - DNA, 127 bp, synthetic construct
  source 1..127: mol_type = other DNA
acatttgttgatacaaccataaaatgataattccacccctacattgataattatcacacccaatttaactataacgctctgatcatagtcagaccaacattgctacgacccgtattcgcaccgacac

SEQ ID NO: 2424 - DNA, 127 bp, synthetic construct
  source 1..127: mol_type = other DNA
acatttgttgatacaaccatcaaatgataattccacccctacattgataattatcacacccaatttaactataacgctctgatcatagtcagaccaacattgctacgacccgtattcgcaccgacac

SEQ ID NO: 2425 - DNA, 127 bp, synthetic construct
  source 1..127: mol_type = other DNA
acatttgttgatacaaccataaaatggtaattacacccatacattgataattatcacacccaatttaactataacgctctgatcatagtcagaccaacattgctacgacccgtattcgcaccgacac

SEQ ID NO: 2426 - DNA, 127 bp, synthetic construct
  source 1..127: mol_type = other DNA
acatttgttgatacaaccatcaaatggtaattacacccatacattgataattatcacacccaatttaactataacgctctgatcatagtcagaccaacattgctacgacccgtattcgcaccgacac

SEQ ID NO: 2427 - DNA, 127 bp, synthetic construct
  source 1..127: mol_type = other DNA
acatttgttgatacaaccataaaatggtaattacacccctacattgataattatcacacccaatttaactataacgctctgatcatagtcagaccaacattgctacgacccgtattcgcaccgacac

SEQ ID NO: 2428 - DNA, 127 bp, synthetic construct
  source 1..127: mol_type = other DNA
acatttgttgatacaaccatcaaatggtaattacacccctacattgataattatcacacccaatttaactataacgctctgatcatagtcagaccaacattgctacgacccgtattcgcaccgacac

SEQ ID NO: 2429 - DNA, 127 bp, synthetic construct
  source 1..127: mol_type = other DNA
acatttgttgatacaaccataaaatggtaattccacccatacattgataattatcacacccaatttaactataacgctctgatcatagtcagaccaacattgctacgacccgtattcgcaccgacac

SEQ ID NO: 2430 - DNA, 127 bp, synthetic construct
  source 1..127: mol_type = other DNA
acatttgttgatacaaccatcaaatggtaattccacccatacattgataattatcacacccaatttaactataacgctctgatcatagtcagaccaacattgctacgacccgtattcgcaccgacac

SEQ ID NO: 2431 - DNA, 127 bp, synthetic construct
  source 1..127: mol_type = other DNA
acatttgttgatacaaccataaaatggtaattccacccctacattgataattatcacacccaatttaactataacgctctgatcatagtcagaccaacattgctacgacccgtattcgcaccgacac

SEQ ID NO: 2432 - DNA, 127 bp, synthetic construct
  source 1..127: mol_type = other DNA
acatttgttgatacaaccatcaaatggtaattccacccctacattgataattatcacacccaatttaactataacgctctgatcatagtcagaccaacattgctacgacccgtattcgcaccgacac

SEQ ID NO: 2433 - DNA, 127 bp, synthetic construct
  source 1..127: mol_type = other DNA
acatttgttgataccaccataaaatgataattacacccataaattgataattatcacacccaatttaactataacgctctgatcatagtcagaccaacattgctacgacccgtattcgcaccgacac

SEQ ID NO: 2434 - DNA, 127 bp, synthetic construct
  source 1..127: mol_type = other DNA
acatttgttgataccaccatcaaatgataattacacccataaattgataattatcacacccaatttaactataacgctctgatcatagtcagaccaacattgctacgacccgtattcgcaccgacac

SEQ ID NO: 2435 - DNA, 127 bp, synthetic construct
  source 1..127: mol_type = other DNA
acatttgttgataccaccataaaatgataattacacccctaaattgataattatcacacccaatttaactataacgctctgatcatagtcagaccaacattgctacgacccgtattcgcaccgacac

SEQ ID NO: 2436 - DNA, 127 bp, synthetic construct
  source 1..127: mol_type = other DNA
acatttgttgataccaccatcaaatgataattacacccctaaattgataattatcacacccaatttaactataacgctctgatcatagtcagaccaacattgctacgacccgtattcgcaccgacac

SEQ ID NO: 2437 - DNA, 127 bp, synthetic construct
  source 1..127: mol_type = other DNA
acatttgttgataccaccataaaatgataattccacccataaattgataattatcacacccaatttaactataacgctctgatcatagtcagaccaacattgctacgacccgtattcgcaccgacac

SEQ ID NO: 2438 - DNA, 127 bp, synthetic construct
  source 1..127: mol_type = other DNA
acatttgttgataccaccatcaaatgataattccacccataaattgataattatcacacccaatttaactataacgctctgatcatagtcagaccaacattgctacgacccgtattcgcaccgacac

SEQ ID NO: 2439 - DNA, 127 bp, synthetic construct
  source 1..127: mol_type = other DNA
acatttgttgataccaccataaaatgataattccacccctaaattgataattatcacacccaatttaactataacgctctgatcatagtcagaccaacattgctacgacccgtattcgcaccgacac

SEQ ID NO: 2440 - DNA, 127 bp, synthetic construct
  source 1..127: mol_type = other DNA
acatttgttgataccaccatcaaatgataattccacccctaaattgataattatcacacccaatttaactataacgctctgatcatagtcagaccaacattgctacgacccgtattcgcaccgacac

SEQ ID NO: 2441 - DNA, 127 bp, synthetic construct
  source 1..127: mol_type = other DNA
acatttgttgataccaccataaaatggtaattacacccataaattgataattatcacacccaatttaactataacgctctgatcatagtcagaccaacattgctacgacccgtattcgcaccgacac

SEQ ID NO: 2442 - DNA, 127 bp, synthetic construct
  source 1..127: mol_type = other DNA
acatttgttgataccaccatcaaatggtaattacacccataaattgataattatcacacccaatttaactataacgctctgatcatagtcagaccaacattgctacgacccgtattcgcaccgacac

SEQ ID NO: 2443 - DNA, 127 bp, synthetic construct
  source 1..127: mol_type = other DNA
acatttgttgataccaccataaaatggtaattacacccctaaattgataattatcacacccaatttaactataacgctctgatcatagtcagaccaacattgctacgacccgtattcgcaccgacac

SEQ ID NO: 2444 - DNA, 127 bp, synthetic construct
  source 1..127: mol_type = other DNA
acatttgttgataccaccatcaaatggtaattacacccctaaattgataattatcacacccaatttaactataacgctctgatcatagtcagaccaacattgctacgacccgtattcgcaccgacac

SEQ ID NO: 2445 - DNA, 127 bp, synthetic construct
  source 1..127: mol_type = other DNA
acatttgttgataccaccataaaatggtaattccacccataaattgataattatcacacccaatttaactataacgctctgatcatagtcagaccaacattgctacgacccgtattcgcaccgacac

SEQ ID NO: 2446 - DNA, 127 bp, synthetic construct
  source 1..127: mol_type = other DNA
acatttgttgataccaccatcaaatggtaattccacccataaattgataattatcacacccaatttaactataacgctctgatcatagtcagaccaacattgctacgacccgtattcgcaccgacac

SEQ ID NO: 2447 - DNA, 127 bp, synthetic construct
  source 1..127: mol_type = other DNA
acatttgttgataccaccataaaatggtaattccacccctaaattgataattatcacacccaatttaactataacgctctgatcatagtcagaccaacattgctacgacccgtattcgcaccgacac

SEQ ID NO: 2448 - DNA, 127 bp, synthetic construct
  source 1..127: mol_type = other DNA
acatttgttgataccaccatcaaatggtaattccacccctaaattgataattatcacacccaatttaactataacgctctgatcatagtcagaccaacattgctacgacccgtattcgcaccgacac

SEQ ID NO: 2449 - DNA, 127 bp, synthetic construct
  source 1..127: mol_type = other DNA
acatttgttgataccaccataaaatgataattacacccatacattgataattatcacacccaatttaactataacgctctgatcatagtcagaccaacattgctacgacccgtattcgcaccgacac

SEQ ID NO: 2450 - DNA, 127 bp, synthetic construct
  source 1..127: mol_type = other DNA
acatttgttgataccaccatcaaatgataattacacccatacattgataattatcacacccaatttaactataacgctctgatcatagtcagaccaacattgctacgacccgtattcgcaccgacac

SEQ ID NO: 2451 - DNA, 127 bp, synthetic construct
  source 1..127: mol_type = other DNA
acatttgttgataccaccataaaatgataattacacccctacattgataattatcacacccaatttaactataacgctctgatcatagtcagaccaacattgctacgacccgtattcgcaccgacac

SEQ ID NO: 2452 - DNA, 127 bp, synthetic construct
  source 1..127: mol_type = other DNA
acatttgttgataccaccatcaaatgataattacacccctacattgataattatcacacccaatttaactataacgctctgatcatagtcagaccaacattgctacgacccgtattcgcaccgacac

SEQ ID NO: 2453 - DNA, 127 bp, synthetic construct
  source 1..127: mol_type = other DNA
acatttgttgataccaccataaaatgataattccacccatacattgataattatcacacccaatttaactataacgctctgatcatagtcagaccaacattgctacgacccgtattcgcaccgacac

SEQ ID NO: 2454 - DNA, 127 bp, synthetic construct
  source 1..127: mol_type = other DNA
acatttgttgataccaccatcaaatgataattccacccatacattgataattatcacacccaatttaactataacgctctgatcatagtcagaccaacattgctacgacccgtattcgcaccgacac

SEQ ID NO: 2455 - DNA, 127 bp, synthetic construct
  source 1..127: mol_type = other DNA
acatttgttgataccaccataaaatgataattccacccctacattgataattatcacacccaatttaactataacgctctgatcatagtcagaccaacattgctacgacccgtattcgcaccgacac

SEQ ID NO: 2456 - DNA, 127 bp, synthetic construct
  source 1..127: mol_type = other DNA
acatttgttgataccaccatcaaatgataattccacccctacattgataattatcacacccaatttaactataacgctctgatcatagtcagaccaacattgctacgacccgtattcgcaccgacac

SEQ ID NO: 2457 - DNA, 127 bp, synthetic construct
  source 1..127: mol_type = other DNA
acatttgttgataccaccataaaatggtaattacacccatacattgataattatcacacccaatttaactataacgctctgatcatagtcagaccaacattgctacgacccgtattcgcaccgacac

SEQ ID NO: 2458 - DNA, 127 bp, synthetic construct
  source 1..127: mol_type = other DNA
acatttgttgataccaccatcaaatggtaattacacccatacattgataattatcacacccaatttaactataacgctctgatcatagtcagaccaacattgctacgacccgtattcgcaccgacac

SEQ ID NO: 2459 - DNA, 127 bp, synthetic construct
  source 1..127: mol_type = other DNA
acatttgttgataccaccataaaatggtaattacacccctacattgataattatcacacccaatttaactataacgctctgatcatagtcagaccaacattgctacgacccgtattcgcaccgacac

SEQ ID NO: 2460 - DNA, 127 bp, synthetic construct
  source 1..127: mol_type = other DNA
acatttgttgataccaccatcaaatggtaattacacccctacattgataattatcacacccaatttaactataacgctctgatcatagtcagaccaacattgctacgacccgtattcgcaccgacac

SEQ ID NO: 2461 - DNA, 127 bp, synthetic construct
  source 1..127: mol_type = other DNA
acatttgttgataccaccataaaatggtaattccacccatacattgataattatcacacccaatttaactataacgctctgatcatagtcagaccaacattgctacgacccgtattcgcaccgacac

SEQ ID NO: 2462 - DNA, 127 bp, synthetic construct
  source 1..127: mol_type = other DNA
acatttgttgataccaccatcaaatggtaattccacccatacattgataattatcacacccaatttaactataacgctctgatcatagtcagaccaacattgctacgacccgtattcgcaccgacac

SEQ ID NO: 2463 - DNA, 127 bp, synthetic construct
  source 1..127: mol_type = other DNA
acatttgttgataccaccataaaatggtaattccacccctacattgataattatcacacccaatttaactataacgctctgatcatagtcagaccaacattgctacgacccgtattcgcaccgacac

SEQ ID NO: 2464 - DNA, 127 bp, synthetic construct
  source 1..127: mol_type = other DNA
acatttgttgataccaccatcaaatggtaattccacccctacattgataattatcacacccaatttaactataacgctctgatcatagtcagaccaacattgctacgacccgtattcgcaccgacac

SEQ ID NO: 2465 - DNA, 127 bp, synthetic construct
  source 1..127: mol_type = other DNA
acatttgtttatacaaccataaaatgataattacacccataaattgataattatcacacccaatttaactataacgctctgatcatagtcagaccaacattgctacgacccgtattcgcaccgacac

SEQ ID NO: 2466 - DNA, 127 bp, synthetic construct
  source 1..127: mol_type = other DNA
acatttgttgaaacaaccataaaatgataattacacccataaattgataattatcacacccaatttaactataacgctctgatcatagtcagaccaacattgctacgacccgtattcgcaccgacac

SEQ ID NO: 2467 - DNA, 127 bp, synthetic construct
  source 1..127: mol_type = other DNA
acatttgttgatacatccataaaatgataattacacccataaattgataattatcacacccaatttaactataacgctctgatcatagtcagaccaacattgctacgacccgtattcgcaccgacac

SEQ ID NO: 2468 - DNA, 127 bp, synthetic construct
  source 1..127: mol_type = other DNA
acatttgttgatacacccataaaatgataattacacccataaattgataattatcacacccaatttaactataacgctctgatcatagtcagaccaacattgctacgacccgtattcgcaccgacac

SEQ ID NO: 2469 - DNA, 127 bp, synthetic construct
  source 1..127: mol_type = other DNA
acatttgttgatacagccataaaatgataattacacccataaattgataattatcacacccaatttaactataacgctctgatcatagtcagaccaacattgctacgacccgtattcgcaccgacac

SEQ ID NO: 2470 - DNA, 127 bp, synthetic construct
  source 1..127: mol_type = other DNA
acatttgttgatacaacaataaaatgataattacacccataaattgataattatcacacccaatttaactataacgctctgatcatagtcagaccaacattgctacgacccgtattcgcaccgacac

SEQ ID NO: 2471 - DNA, 127 bp, synthetic construct
  source 1..127: mol_type = other DNA
acatttgttgatacaaccttaaaatgataattacacccataaattgataattatcacacccaatttaactataacgctctgatcatagtcagaccaacattgctacgacccgtattcgcaccgacac

SEQ ID NO: 2472 - DNA, 127 bp, synthetic construct
  source 1..127: mol_type = other DNA
acatttgttgatacaaccaaaaaatgataattacacccataaattgataattatcacacccaatttaactataacgctctgatcatagtcagaccaacattgctacgacccgtattcgcaccgacac

SEQ ID NO: 2473 - DNA, 127 bp, synthetic construct
  source 1..127: mol_type = other DNA
acatttgttgatacaaccagaaaatgataattacacccataaattgataattatcacacccaatttaactataacgctctgatcatagtcagaccaacattgctacgacccgtattcgcaccgacac

SEQ ID NO: 2474 - DNA, 127 bp, synthetic construct
  source 1..127: mol_type = other DNA
acatttgttgatacaaccatataatgataattacacccataaattgataattatcacacccaatttaactataacgctctgatcatagtcagaccaacattgctacgacccgtattcgcaccgacac

SEQ ID NO: 2475 - DNA, 127 bp, synthetic construct
  source 1..127: mol_type = other DNA
acatttgttgatacaaccatacaatgataattacacccataaattgataattatcacacccaatttaactataacgctctgatcatagtcagaccaacattgctacgacccgtattcgcaccgacac

SEQ ID NO: 2476 - DNA, 127 bp, synthetic construct
  source 1..127: mol_type = other DNA
acatttgttgatacaaccataaattgataattacacccataaattgataattatcacacccaatttaactataacgctctgatcatagtcagaccaacattgctacgacccgtattcgcaccgacac

SEQ ID NO: 2477 - DNA, 127 bp, synthetic construct
  source 1..127: mol_type = other DNA
acatttgttgatacaaccataaactgataattacacccataaattgataattatcacacccaatttaactataacgctctgatcatagtcagaccaacattgctacgacccgtattcgcaccgacac

SEQ ID NO: 2478 - DNA, 127 bp, synthetic construct
  source 1..127: mol_type = other DNA
acatttgttgatacaaccataaagtgataattacacccataaattgataattatcacacccaatttaactataacgctctgatcatagtcagaccaacattgctacgacccgtattcgcaccgacac

SEQ ID NO: 2479 - DNA, 127 bp, synthetic construct
  source 1..127: mol_type = other DNA
acatttgttgatacaaccataaaattataattacacccataaattgataattatcacacccaatttaactataacgctctgatcatagtcagaccaacattgctacgacccgtattcgcaccgacac

SEQ ID NO: 2480 - DNA, 127 bp, synthetic construct
  source 1..127: mol_type = other DNA
acatttgttgatacaaccataaaataataattacacccataaattgataattatcacacccaatttaactataacgctctgatcatagtcagaccaacattgctacgacccgtattcgcaccgacac

SEQ ID NO: 2481 - DNA, 127 bp, synthetic construct
  source 1..127: mol_type = other DNA
acatttgttgatacaaccataaaatgataattacacccataatttgataattatcacacccaatttaactataacgctctgatcatagtcagaccaacattgctacgacccgtattcgcaccgacac

SEQ ID NO: 2482 - DNA, 127 bp, synthetic construct
  source 1..127: mol_type = other DNA
acatttgttgatacaaccataaaatgataattacacccataacttgataattatcacacccaatttaactataacgctctgatcatagtcagaccaacattgctacgacccgtattcgcaccgacac

SEQ ID NO: 2483 - DNA, 127 bp, synthetic construct
  source 1..127: mol_type = other DNA
acatttgttgatacaaccataaaatgataattacacccataagttgataattatcacacccaatttaactataacgctctgatcatagtcagaccaacattgctacgacccgtattcgcaccgacac

SEQ ID NO: 2484 - DNA, 127 bp, synthetic construct
  source 1..127: mol_type = other DNA
acatttgttgatacaaccataaaatgataattacacccataaatttataattatcacacccaatttaactataacgctctgatcatagtcagaccaacattgctacgacccgtattcgcaccgacac

SEQ ID NO: 2485 - DNA, 127 bp, synthetic construct
  source 1..127: mol_type = other DNA
acatttgttgatacaaccataaaatgataattacacccataaattgacaattatcacacccaatttaactataacgctctgatcatagtcagaccaacattgctacgacccgtattcgcaccgacac

SEQ ID NO: 2486 - DNA, 127 bp, synthetic construct
  source 1..127: mol_type = other DNA
acatttgttgatacaaccataaaatgataattacacccataaattgattattatcacacccaatttaactataacgctctgatcatagtcagaccaacattgctacgacccgtattcgcaccgacac

SEQ ID NO: 2487 - DNA, 127 bp, synthetic construct
  source 1..127: mol_type = other DNA
acatttgttgatacaaccataaaatgataattacacccataaattgataattatcaaacccaatttaactataacgctctgatcatagtcagaccaacattgctacgacccgtattcgcaccgacac

SEQ ID NO: 2488 - DNA, 127 bp, synthetic construct
  source 1..127: mol_type = other DNA
acatttgttgatacaaccataaaatgataattacacccataaattgataattatcactcccaatttaactataacgctctgatcatagtcagaccaacattgctacgacccgtattcgcaccgacac

SEQ ID NO: 2489 - DNA, 127 bp, synthetic construct
  source 1..127: mol_type = other DNA
acatttgtggatacaaccataaaatgataattacacccataaatttataattatcacacccaatttaactataacgctctgatcatagtcagaccaacattgctacgacccgtattcgcaccgacac

SEQ ID NO: 2490 - DNA, 127 bp, synthetic construct
  source 1..127: mol_type = other DNA
acatttgtttatacaaccataaaatgataattacacccataaatggataattatcacacccaatttaactataacgctctgatcatagtcagaccaacattgctacgacccgtattcgcaccgacac

SEQ ID NO: 2491 - DNA, 127 bp, synthetic construct
  source 1..127: mol_type = other DNA
acatttgtttatacaaccataaaatgataattacacccataaatttataattatcacacccaatttaactataacgctctgatcatagtcagaccaacattgctacgacccgtattcgcaccgacac

SEQ ID NO: 2492 - DNA, 127 bp, synthetic construct
  source 1..127: mol_type = other DNA
acatttgtttatacaaccataaaatgataattacacccataaattcataattatcacacccaatttaactataacgctctgatcatagtcagaccaacattgctacgacccgtattcgcaccgacac

SEQ ID NO: 2493 - DNA, 127 bp, synthetic construct
  source 1..127: mol_type = other DNA
acatttgttgatacaaccataaaatgataattacacccataaatggattattatcacacccaatttaactataacgctctgatcatagtcagaccaacattgctacgacccgtattcgcaccgacac

SEQ ID NO: 2494 - DNA, 127 bp, synthetic construct
  source 1..127: mol_type = other DNA
acatttgttgatacaaccataaaatgataattacacccataaatttattattatcacacccaatttaactataacgctctgatcatagtcagaccaacattgctacgacccgtattcgcaccgacac

SEQ ID NO: 2495 - DNA, 127 bp, synthetic construct
  source 1..127: mol_type = other DNA
acatttgttgatacaaccataaaatgataattacacccataaattcattattatcacacccaatttaactataacgctctgatcatagtcagaccaacattgctacgacccgtattcgcaccgacac

SEQ ID NO: 2496 - DNA, 127 bp, synthetic construct
  source 1..127: mol_type = other DNA
acatttgtggatacaaccataaaatgataattacacccataaatggattattatcacacccaatttaactataacgctctgatcatagtcagaccaacattgctacgacccgtattcgcaccgacac

SEQ ID NO: 2497 - DNA, 127 bp, synthetic construct
  source 1..127: mol_type = other DNA
acatttgtggatacaaccataaaatgataattacacccataaatttattattatcacacccaatttaactataacgctctgatcatagtcagaccaacattgctacgacccgtattcgcaccgacac

SEQ ID NO: 2498 - DNA, 127 bp, synthetic construct
  source 1..127: mol_type = other DNA
acatttgtggatacaaccataaaatgataattacacccataaattcattattatcacacccaatttaactataacgctctgatcatagtcagaccaacattgctacgacccgtattcgcaccgacac

SEQ ID NO: 2499 - DNA, 127 bp, synthetic construct
  source 1..127: mol_type = other DNA
acatttgtttatacaaccataaaatgataattacacccataaatggattattatcacacccaatttaactataacgctctgatcatagtcagaccaacattgctacgacccgtattcgcaccgacac

SEQ ID NO: 2500 - DNA, 127 bp, synthetic construct
  source 1..127: mol_type = other DNA
acatttgtttatacaaccataaaatgataattacacccataaatttattattatcacacccaatttaactataacgctctgatcatagtcagaccaacattgctacgacccgtattcgcaccgacac

SEQ ID NO: 2501 - DNA, 127 bp, synthetic construct
  source 1..127: mol_type = other DNA
acatttgtttatacaaccataaaatgataattacacccataaattcattattatcacacccaatttaactataacgctctgatcatagtcagaccaacattgctacgacccgtattcgcaccgacac

SEQ ID NO: 2502 - DNA, 127 bp, synthetic construct
  source 1..127: mol_type = other DNA
acatttgttaatacaaccataaaatgataattacacccataaattgataattatcacacccaatttaactataacgctctgatcatagtcagaccaacattgctacgacccgtattcgcaccgacac

SEQ ID NO: 2503 - DNA, 127 bp, synthetic construct
  source 1..127: mol_type = other DNA
acatttgttgttacaaccataaaatgataattacacccataaattgataattatcacacccaatttaactataacgctctgatcatagtcagaccaacattgctacgacccgtattcgcaccgacac

SEQ ID NO: 2504 - DNA, 127 bp, synthetic construct
  source 1..127: mol_type = other DNA
acatttgttgctacaaccataaaatgataattacacccataaattgataattatcacacccaatttaactataacgctctgatcatagtcagaccaacattgctacgacccgtattcgcaccgacac

SEQ ID NO: 2505 - DNA, 127 bp, synthetic construct
  source 1..127: mol_type = other DNA
acatttgttggtacaaccataaaatgataattacacccataaattgataattatcacacccaatttaactataacgctctgatcatagtcagaccaacattgctacgacccgtattcgcaccgacac

SEQ ID NO: 2506 - DNA, 127 bp, synthetic construct
  source 1..127: mol_type = other DNA
acatttgttgatacaaccataatatgataattacacccataaattgataattatcacacccaatttaactataacgctctgatcatagtcagaccaacattgctacgacccgtattcgcaccgacac

SEQ ID NO: 2507 - DNA, 127 bp, synthetic construct
  source 1..127: mol_type = other DNA
acatttgttgatacaaccataacatgataattacacccataaattgataattatcacacccaatttaactataacgctctgatcatagtcagaccaacattgctacgacccgtattcgcaccgacac

SEQ ID NO: 2508 - DNA, 127 bp, synthetic construct
  source 1..127: mol_type = other DNA
acatttgttgatacaaccataaaatgacaattacacccataaattgataattatcacacccaatttaactataacgctctgatcatagtcagaccaacattgctacgacccgtattcgcaccgacac

SEQ ID NO: 2509 - DNA, 127 bp, synthetic construct
  source 1..127: mol_type = other DNA
acatttgttgatacaaccataaaatgattattacacccataaattgataattatcacacccaatttaactataacgctctgatcatagtcagaccaacattgctacgacccgtattcgcaccgacac

SEQ ID NO: 2510 - DNA, 127 bp, synthetic construct
  source 1..127: mol_type = other DNA
acatttgttgatacaaccataaaatgataattaaacccataaattgataattatcacacccaatttaactataacgctctgatcatagtcagaccaacattgctacgacccgtattcgcaccgacac

SEQ ID NO: 2511 - DNA, 127 bp, synthetic construct
  source 1..127: mol_type = other DNA
acatttgttgatacaaccataaaatgataattactcccataaattgataattatcacacccaatttaactataacgctctgatcatagtcagaccaacattgctacgacccgtattcgcaccgacac

SEQ ID NO: 2512 - DNA, 127 bp, synthetic construct
  source 1..127: mol_type = other DNA
acatttgttgatacaaccataaaatgataattacaaccataaattgataattatcacacccaatttaactataacgctctgatcatagtcagaccaacattgctacgacccgtattcgcaccgacac

SEQ ID NO: 2513 - DNA, 127 bp, synthetic construct
  source 1..127: mol_type = other DNA
acatttgttgatacaaccataaaatgataattacagccataaattgataattatcacacccaatttaactataacgctctgatcatagtcagaccaacattgctacgacccgtattcgcaccgacac

SEQ ID NO: 2514 - DNA, 127 bp, synthetic construct
  source 1..127: mol_type = other DNA
acatttgttgatacaaccataaaatgataattacacccacaaattgataattatcacacccaatttaactataacgctctgatcatagtcagaccaacattgctacgacccgtattcgcaccgacac

SEQ ID NO: 2515 - DNA, 127 bp, synthetic construct
  source 1..127: mol_type = other DNA
acatttgttgatacaaccataaaatgataattacacccattaattgataattatcacacccaatttaactataacgctctgatcatagtcagaccaacattgctacgacccgtattcgcaccgacac

SEQ ID NO: 2516 - DNA, 127 bp, synthetic construct
  source 1..127: mol_type = other DNA
acatttgttgatacaaccataaaatgataattacacccataaattaataattatcacacccaatttaactataacgctctgatcatagtcagaccaacattgctacgacccgtattcgcaccgacac

SEQ ID NO: 2517 - DNA, 127 bp, synthetic construct
  source 1..127: mol_type = other DNA
acatttgttgatacaaccataaaatgataattacacccataaattgttaattatcacacccaatttaactataacgctctgatcatagtcagaccaacattgctacgacccgtattcgcaccgacac

SEQ ID NO: 2518 - DNA, 127 bp, synthetic construct
  source 1..127: mol_type = other DNA
acatttgttgatacaaccataaaatgataattacacccataaattgctaattatcacacccaatttaactataacgctctgatcatagtcagaccaacattgctacgacccgtattcgcaccgacac

SEQ ID NO: 2519 - DNA, 127 bp, synthetic construct
  source 1..127: mol_type = other DNA
acatttgttgatacaaccataaaatgataattacacccataaattggtaattatcacacccaatttaactataacgctctgatcatagtcagaccaacattgctacgacccgtattcgcaccgacac

SEQ ID NO: 2520 - DNA, 127 bp, synthetic construct
  source 1..127: mol_type = other DNA
acatttgttgatacaaccataaaatgataattacacccataaattgatatttatcacacccaatttaactataacgctctgatcatagtcagaccaacattgctacgacccgtattcgcaccgacac

SEQ ID NO: 2521 - DNA, 127 bp, synthetic construct
  source 1..127: mol_type = other DNA
acatttgttgatacaaccataaaatgataattacacccataaattgatacttatcacacccaatttaactataacgctctgatcatagtcagaccaacattgctacgacccgtattcgcaccgacac

SEQ ID NO: 2522 - DNA, 127 bp, synthetic construct
  source 1..127: mol_type = other DNA
acatttgttgatacaaccataaaatgataattacacccataaattgatagttatcacacccaatttaactataacgctctgatcatagtcagaccaacattgctacgacccgtattcgcaccgacac

SEQ ID NO: 2523 - DNA, 127 bp, synthetic construct
  source 1..127: mol_type = other DNA
acatttgttgatacaaccataaaatgataattacacccataaattgataataatcacacccaatttaactataacgctctgatcatagtcagaccaacattgctacgacccgtattcgcaccgacac

SEQ ID NO: 2524 - DNA, 127 bp, synthetic construct
  source 1..127: mol_type = other DNA
acatttgttgatacaaccataaaatgataattacacccataaattgataattataacacccaatttaactataacgctctgatcatagtcagaccaacattgctacgacccgtattcgcaccgacac

SEQ ID NO: 2525 - DNA, 127 bp, synthetic construct
  source 1..127: mol_type = other DNA
acatttgttgatacaaccataaaatgataattacacccataaattgataattatctcacccaatttaactataacgctctgatcatagtcagaccaacattgctacgacccgtattcgcaccgacac

SEQ ID NO: 2526 - DNA, 127 bp, synthetic construct
  source 1..127: mol_type = other DNA
acatttgttgatacaaccataaaatgataattacacccataaattgataattatcagacccaatttaactataacgctctgatcatagtcagaccaacattgctacgacccgtattcgcaccgacac

SEQ ID NO: 2527 - DNA, 127 bp, synthetic construct
  source 1..127: mol_type = other DNA
acatttgttgatacaaccataaaatgattattacacccattaattgataattatcacacccaatttaactataacgctctgatcatagtcagaccaacattgctacgacccgtattcgcaccgacac

SEQ ID NO: 2528 - DNA, 127 bp, synthetic construct
  source 1..127: mol_type = other DNA
acatttgttgatacaaccataaaaggattattacacccattaattgataattatcacacccaatttaactataacgctctgatcatagtcagaccaacattgctacgacccgtattcgcaccgacac

SEQ ID NO: 2529 - DNA, 127 bp, synthetic construct
  source 1..127: mol_type = other DNA
acatttgttgatacaaccataaaattattattacacccattaattgataattatcacacccaatttaactataacgctctgatcatagtcagaccaacattgctacgacccgtattcgcaccgacac

SEQ ID NO: 2530 - DNA, 127 bp, synthetic construct
  source 1..127: mol_type = other DNA
acatttgttgatacaaccataaaatcattattacacccattaattgataattatcacacccaatttaactataacgctctgatcatagtcagaccaacattgctacgacccgtattcgcaccgacac

SEQ ID NO: 2531 - DNA, 127 bp, synthetic construct
  source 1..127: mol_type = other DNA
acatttgttgatactaccataaaatgataattacacccataaattgataattatcacacccaatttaactataacgctctgatcatagtcagaccaacattgctacgacccgtattcgcaccgacac

SEQ ID NO: 2532 - DNA, 127 bp, synthetic construct
  source 1..127: mol_type = other DNA
acatttgttgatacaaccacaaaatgataattacacccataaattgataattatcacacccaatttaactataacgctctgatcatagtcagaccaacattgctacgacccgtattcgcaccgacac

SEQ ID NO: 2533 - DNA, 127 bp, synthetic construct
  source 1..127: mol_type = other DNA
acatttgttgatacaaccattaaatgataattacacccataaattgataattatcacacccaatttaactataacgctctgatcatagtcagaccaacattgctacgacccgtattcgcaccgacac

SEQ ID NO: 2534 - DNA, 127 bp, synthetic construct
  source 1..127: mol_type = other DNA
acatttgttgatacaaccataaaatgttaattacacccataaattgataattatcacacccaatttaactataacgctctgatcatagtcagaccaacattgctacgacccgtattcgcaccgacac

SEQ ID NO: 2535 - DNA, 127 bp, synthetic construct
  source 1..127: mol_type = other DNA
acatttgttgatacaaccataaaatgctaattacacccataaattgataattatcacacccaatttaactataacgctctgatcatagtcagaccaacattgctacgacccgtattcgcaccgacac

SEQ ID NO: 2536 - DNA, 127 bp, synthetic construct
  source 1..127: mol_type = other DNA
acatttgttgatacaaccataaaatgatatttacacccataaattgataattatcacacccaatttaactataacgctctgatcatagtcagaccaacattgctacgacccgtattcgcaccgacac

SEQ ID NO: 2537 - DNA, 127 bp, synthetic construct
  source 1..127: mol_type = other DNA
acatttgttgatacaaccataaaatgatacttacacccataaattgataattatcacacccaatttaactataacgctctgatcatagtcagaccaacattgctacgacccgtattcgcaccgacac

SEQ ID NO: 2538 - DNA, 127 bp, synthetic construct
  source 1..127: mol_type = other DNA
acatttgttgatacaaccataaaatgatagttacacccataaattgataattatcacacccaatttaactataacgctctgatcatagtcagaccaacattgctacgacccgtattcgcaccgacac

SEQ ID NO: 2539 - DNA, 127 bp, synthetic construct
  source 1..127: mol_type = other DNA
acatttgttgatacaaccataaaatgataataacacccataaattgataattatcacacccaatttaactataacgctctgatcatagtcagaccaacattgctacgacccgtattcgcaccgacac

SEQ ID NO: 2540 - DNA, 127 bp, synthetic construct
  source 1..127: mol_type = other DNA
acatttgttgatacaaccataaaatgataattacaccaataaattgataattatcacacccaatttaactataacgctctgatcatagtcagaccaacattgctacgacccgtattcgcaccgacac

SEQ ID NO: 2541 - DNA, 127 bp, synthetic construct
  source 1..127: mol_type = other DNA
acatttgttgatacaaccataaaatgataattacacccttaaattgataattatcacacccaatttaactataacgctctgatcatagtcagaccaacattgctacgacccgtattcgcaccgacac

SEQ ID NO: 2542 - DNA, 127 bp, synthetic construct
  source 1..127: mol_type = other DNA
acatttgttgatacaaccataaaatgataattacacccaaaaattgataattatcacacccaatttaactataacgctctgatcatagtcagaccaacattgctacgacccgtattcgcaccgacac

SEQ ID NO: 2543 - DNA, 127 bp, synthetic construct
  source 1..127: mol_type = other DNA
acatttgttgatacaaccataaaatgataattacacccagaaattgataattatcacacccaatttaactataacgctctgatcatagtcagaccaacattgctacgacccgtattcgcaccgacac

SEQ ID NO: 2544 - DNA, 127 bp, synthetic construct
  source 1..127: mol_type = other DNA
acatttgttgatacaaccataaaatgataattacacccatatattgataattatcacacccaatttaactataacgctctgatcatagtcagaccaacattgctacgacccgtattcgcaccgacac

SEQ ID NO: 2545 - DNA, 127 bp, synthetic construct
  source 1..127: mol_type = other DNA
acatttgttgatacaaccattaaatggtaattacacccataaattgataattatcacacccaatttaactataacgctctgatcatagtcagaccaacattgctacgacccgtattcgcaccgacac

SEQ ID NO: 2546 - DNA, 127 bp, synthetic construct
  source 1..127: mol_type = other DNA
acatttgttgatacaaccattaaatgataattccacccataaattgataattatcacacccaatttaactataacgctctgatcatagtcagaccaacattgctacgacccgtattcgcaccgacac

SEQ ID NO: 2547 - DNA, 127 bp, synthetic construct
  source 1..127: mol_type = other DNA
acatttgttgatacaaccattaaatgataattacacccaaaaattgataattatcacacccaatttaactataacgctctgatcatagtcagaccaacattgctacgacccgtattcgcaccgacac

SEQ ID NO: 2548 - DNA, 127 bp, synthetic construct
  source 1..127: mol_type = other DNA
acatttgttgatacaaccattaaatgataattacacccatatattgataattatcacacccaatttaactataacgctctgatcatagtcagaccaacattgctacgacccgtattcgcaccgacac

SEQ ID NO: 2549 - DNA, 127 bp, synthetic construct
  source 1..127: mol_type = other DNA
acatttgttgatacaaccattaaatgataattacacccataatttgataattatcacacccaatttaactataacgctctgatcatagtcagaccaacattgctacgacccgtattcgcaccgacac

SEQ ID NO: 2550 - DNA, 127 bp, synthetic construct
  source 1..127: mol_type = other DNA
acatttgttgatacaaccattaaataataattccacccataaattgataattatcacacccaatttaactataacgctctgatcatagtcagaccaacattgctacgacccgtattcgcaccgacac

SEQ ID NO: 2551 - DNA, 127 bp, synthetic construct
  source 1..127: mol_type = other DNA
acatttgttgatacaaccattaaatgttaattccacccataaattgataattatcacacccaatttaactataacgctctgatcatagtcagaccaacattgctacgacccgtattcgcaccgacac

SEQ ID NO: 2552 - DNA, 127 bp, synthetic construct
  source 1..127: mol_type = other DNA
acatttgttgatacaaccattaaatgctaattccacccataaattgataattatcacacccaatttaactataacgctctgatcatagtcagaccaacattgctacgacccgtattcgcaccgacac

SEQ ID NO: 2553 - DNA, 127 bp, synthetic construct
  source 1..127: mol_type = other DNA
acatttgttgatacaaccattaaatggtaattccacccataaattgataattatcacacccaatttaactataacgctctgatcatagtcagaccaacattgctacgacccgtattcgcaccgacac

SEQ ID NO: 2554 - DNA, 127 bp, synthetic construct
  source 1..127: mol_type = other DNA
acatttgttgatacaaccattaaatgataattccaccaataaattgataattatcacacccaatttaactataacgctctgatcatagtcagaccaacattgctacgacccgtattcgcaccgacac

SEQ ID NO: 2555 - DNA, 127 bp, synthetic construct
  source 1..127: mol_type = other DNA
acatttgttgatacaaccattaaatgataattccacccttaaattgataattatcacacccaatttaactataacgctctgatcatagtcagaccaacattgctacgacccgtattcgcaccgacac

SEQ ID NO: 2556 - DNA, 127 bp, synthetic construct
  source 1..127: mol_type = other DNA
acatttgttgatacaaccattaaatgataattccacccctaaattgataattatcacacccaatttaactataacgctctgatcatagtcagaccaacattgctacgacccgtattcgcaccgacac

SEQ ID NO: 2557 - DNA, 127 bp, synthetic construct
  source 1..127: mol_type = other DNA
acatttgttgatacaaccattaaatgataattccacccaaaaattgataattatcacacccaatttaactataacgctctgatcatagtcagaccaacattgctacgacccgtattcgcaccgacac

SEQ ID NO: 2558 - DNA, 127 bp, synthetic construct
  source 1..127: mol_type = other DNA
acatttgttgatacaaccattaaatgataattccacccagaaattgataattatcacacccaatttaactataacgctctgatcatagtcagaccaacattgctacgacccgtattcgcaccgacac

SEQ ID NO: 2559 - DNA, 127 bp, synthetic construct
  source 1..127: mol_type = other DNA
acatttgttgatacaaccattaaatgataattccacccatcaattgataattatcacacccaatttaactataacgctctgatcatagtcagaccaacattgctacgacccgtattcgcaccgacac

SEQ ID NO: 2560 - DNA, 127 bp, synthetic construct
  source 1..127: mol_type = other DNA
acatttgttgatacaaccattaaatgataattccacccatatattgataattatcacacccaatttaactataacgctctgatcatagtcagaccaacattgctacgacccgtattcgcaccgacac

SEQ ID NO: 2561 - DNA, 127 bp, synthetic construct
  source 1..127: mol_type = other DNA
acatttgttgatacaaccattaaatgataattccacccatacattgataattatcacacccaatttaactataacgctctgatcatagtcagaccaacattgctacgacccgtattcgcaccgacac

SEQ ID NO: 2562 - DNA, 127 bp, synthetic construct
  source 1..127: mol_type = other DNA
acatttgttgatacaaccattaaatgataattccacccataatttgataattatcacacccaatttaactataacgctctgatcatagtcagaccaacattgctacgacccgtattcgcaccgacac

SEQ ID NO: 2563 - DNA, 127 bp, synthetic construct
  source 1..127: mol_type = other DNA
acatttgttgatacaaccattaaatgataattccacccataacttgataattatcacacccaatttaactataacgctctgatcatagtcagaccaacattgctacgacccgtattcgcaccgacac

SEQ ID NO: 2564 - DNA, 127 bp, synthetic construct
  source 1..127: mol_type = other DNA
acatttgttgatacaaccattaaatggtaattccacccatatattgataattatcacacccaatttaactataacgctctgatcatagtcagaccaacattgctacgacccgtattcgcaccgacac

SEQ ID NO: 2565 - DNA, 127 bp, synthetic construct
  source 1..127: mol_type = other DNA
acatttgttgatacaaccattaaatgataattccacccaaatattgataattatcacacccaatttaactataacgctctgatcatagtcagaccaacattgctacgacccgtattcgcaccgacac

SEQ ID NO: 2566 - DNA, 127 bp, synthetic construct
  source 1..127: mol_type = other DNA
acatttgttgatacaaccattaaatggtaattccacccaaaaattgataattatcacacccaatttaactataacgctctgatcatagtcagaccaacattgctacgacccgtattcgcaccgacac

SEQ ID NO: 2567 - DNA, 127 bp, synthetic construct
  source 1..127: mol_type = other DNA
acatttgttgatacaaccattaaatggtaattccacccaaatattgataattatcacacccaatttaactataacgctctgatcatagtcagaccaacattgctacgacccgtattcgcaccgacac

SEQ ID NO: 2568 - DNA, 127 bp, synthetic construct
  source 1..127: mol_type = other DNA
acatttgttgatacaaccataaaatgataattacacccataaattgataattatcacaccaaatttaactataacgctctgatcatagtcagaccaacattgctacgacccgtattcgcaccgacac

SEQ ID NO: 2569 - DNA, 127 bp, synthetic construct
  source 1..127: mol_type = other DNA
acatttgttgatacaaccataaaatgataattacacccataaattgataattatcacaccgaatttaactataacgctctgatcatagtcagaccaacattgctacgacccgtattcgcaccgacac

SEQ ID NO: 2570 - DNA, 127 bp, synthetic construct
  source 1..127: mol_type = other DNA
acatttgttgatacaaccataaaatgataattacacccataaattgataattatgacacccaatttaactataacgctctgatcatagtcagaccaacattgctacgacccgtattcgcaccgacac

SEQ ID NO: 2571 - DNA, 127 bp, synthetic construct
  source 1..127: mol_type = other DNA
acatttgttgatacaaccataaaatgataattacacccataaattgataattgtcacacccaatttaactataacgctctgatcatagtcagaccaacattgctacgacccgtattcgcaccgacac

SEQ ID NO: 2572 - DNA, 127 bp, synthetic construct
  source 1..127: mol_type = other DNA
acatttgttgatacaaccataaaatgataattacacccataaattgataatgatcacacccaatttaactataacgctctgatcatagtcagaccaacattgctacgacccgtattcgcaccgacac

SEQ ID NO: 2573 - DNA, 127 bp, synthetic construct
  source 1..127: mol_type = other DNA
acatttgttgatacaaccataaaatgataattagacccataaattgataattatcacacccaatttaactataacgctctgatcatagtcagaccaacattgctacgacccgtattcgcaccgacac

SEQ ID NO: 2574 - DNA, 127 bp, synthetic construct
  source 1..127: mol_type = other DNA
acatttgttgatacaaccataaaatgataaatacacccataaattgataattatcacacccaatttaactataacgctctgatcatagtcagaccaacattgctacgacccgtattcgcaccgacac

SEQ ID NO: 2575 - DNA, 127 bp, synthetic construct
  source 1..127: mol_type = other DNA
acatttgttgatacaaccataaaatgataagtacacccataaattgataattatcacacccaatttaactataacgctctgatcatagtcagaccaacattgctacgacccgtattcgcaccgacac

SEQ ID NO: 2576 - DNA, 127 bp, synthetic construct
  source 1..127: mol_type = other DNA
acatttgttgatacaaccataaaatgataactacacccataaattgataattatcacacccaatttaactataacgctctgatcatagtcagaccaacattgctacgacccgtattcgcaccgacac

SEQ ID NO: 2577 - DNA, 127 bp, synthetic construct
  source 1..127: mol_type = other DNA
acatttgttgatacaaccataaaatgagaattacacccataaattgataattatcacacccaatttaactataacgctctgatcatagtcagaccaacattgctacgacccgtattcgcaccgacac

SEQ ID NO: 2578 - DNA, 127 bp, synthetic construct
  source 1..127: mol_type = other DNA
acatttgttgatacaaccataaaaagataattacacccataaattgataattatcacacccaatttaactataacgctctgatcatagtcagaccaacattgctacgacccgtattcgcaccgacac

SEQ ID NO: 2579 - DNA, 127 bp, synthetic construct
  source 1..127: mol_type = other DNA
acatttgttgatacaaccataagatgataattacacccataaattgataattatcacacccaatttaactataacgctctgatcatagtcagaccaacattgctacgacccgtattcgcaccgacac

SEQ ID NO: 2580 - DNA, 127 bp, synthetic construct
  source 1..127: mol_type = other DNA
acatttgttgatacaaccatagaatgataattacacccataaattgataattatcacacccaatttaactataacgctctgatcatagtcagaccaacattgctacgacccgtattcgcaccgacac

SEQ ID NO: 2581 - DNA, 127 bp, synthetic construct
  source 1..127: mol_type = other DNA
acatttgttgatacaaccgtaaaatgataattacacccataaattgataattatcacacccaatttaactataacgctctgatcatagtcagaccaacattgctacgacccgtattcgcaccgacac

SEQ ID NO: 2582 - DNA, 127 bp, synthetic construct
  source 1..127: mol_type = other DNA
acatttgttgatacaacgataaaatgataattacacccataaattgataattatcacacccaatttaactataacgctctgatcatagtcagaccaacattgctacgacccgtattcgcaccgacac

SEQ ID NO: 2583 - DNA, 127 bp, synthetic construct
  source 1..127: mol_type = other DNA
acatttgttgatacaactataaaatgataattacacccataaattgataattatcacacccaatttaactataacgctctgatcatagtcagaccaacattgctacgacccgtattcgcaccgacac

SEQ ID NO: 2584 - DNA, 127 bp, synthetic construct
  source 1..127: mol_type = other DNA
acatttgttgatacaaccataaaatgataattacacccataaattgataattatgacaccgaatttaactataacgctctgatcatagtcagaccaacattgctacgacccgtattcgcaccgacac

SEQ ID NO: 2585 - DNA, 127 bp, synthetic construct
  source 1..127: mol_type = other DNA
acatttgttgatacaaccataaaatgataattacacccataaattgataattgtgacaccgaatttaactataacgctctgatcatagtcagaccaacattgctacgacccgtattcgcaccgacac

SEQ ID NO: 2586 - DNA, 127 bp, synthetic construct
  source 1..127: mol_type = other DNA
acatttgttgatacaaccataaaatgataattacacccataaattgataataatgacaccgaatttaactataacgctctgatcatagtcagaccaacattgctacgacccgtattcgcaccgacac

SEQ ID NO: 2587 - DNA, 127 bp, synthetic construct
  source 1..127: mol_type = other DNA
acatttgttgatacaaccataaaatgataattacacccataaattgataatgatgacaccgaatttaactataacgctctgatcatagtcagaccaacattgctacgacccgtattcgcaccgacac

SEQ ID NO: 2588 - DNA, 127 bp, synthetic construct
  source 1..127: mol_type = other DNA
acatttgttgatacaaccaaaaaatgataattacacccataaattgataattgtgacaccgaatttaactataacgctctgatcatagtcagaccaacattgctacgacccgtattcgcaccgacac

SEQ ID NO: 2589 - DNA, 127 bp, synthetic construct
  source 1..127: mol_type = other DNA
acatttgttgatacaaccaaaaaatgataattacacccataaattgataataatgacaccgaatttaactataacgctctgatcatagtcagaccaacattgctacgacccgtattcgcaccgacac

SEQ ID NO: 2590 - DNA, 127 bp, synthetic construct
  source 1..127: mol_type = other DNA
acatttgttgatacaaccaaaaaatgataattacacccataaattgataatgatgacaccgaatttaactataacgctctgatcatagtcagaccaacattgctacgacccgtattcgcaccgacac

SEQ ID NO: 2591 - DNA, 127 bp, synthetic construct
  source 1..127: mol_type = other DNA
acatttgttgatacaaccattaaatgataattacacccataaattgataattgtgacaccgaatttaactataacgctctgatcatagtcagaccaacattgctacgacccgtattcgcaccgacac

SEQ ID NO: 2592 - DNA, 127 bp, synthetic construct
  source 1..127: mol_type = other DNA
acatttgttgatacaaccattaaatgataattacacccataaattgataataatgacaccgaatttaactataacgctctgatcatagtcagaccaacattgctacgacccgtattcgcaccgacac

SEQ ID NO: 2593 - DNA, 127 bp, synthetic construct
  source 1..127: mol_type = other DNA
acatttgttgatacaaccattaaatgataattacacccataaattgataatgatgacaccgaatttaactataacgctctgatcatagtcagaccaacattgctacgacccgtattcgcaccgacac

SEQ ID NO: 2594 - DNA, 127 bp, synthetic construct
  source 1..127: mol_type = other DNA
acatttgttgatacaaccataaaaagataattacacccataaattgataattgtgacaccgaatttaactataacgctctgatcatagtcagaccaacattgctacgacccgtattcgcaccgacac

SEQ ID NO: 2595 - DNA, 127 bp, synthetic construct
  source 1..127: mol_type = other DNA
acatttgttgatacaaccataaaaagataattacacccataaattgataataatgacaccgaatttaactataacgctctgatcatagtcagaccaacattgctacgacccgtattcgcaccgacac

SEQ ID NO: 2596 - DNA, 127 bp, synthetic construct
  source 1..127: mol_type = other DNA
acatttgttgatacaaccataaaaagataattacacccataaattgataatgatgacaccgaatttaactataacgctctgatcatagtcagaccaacattgctacgacccgtattcgcaccgacac

SEQ ID NO: 2597 - DNA, 127 bp, synthetic construct
  source 1..127: mol_type = other DNA
acatttgttgatacaaccataaaatgattattacacccataaattgataattgtgacaccgaatttaactataacgctctgatcatagtcagaccaacattgctacgacccgtattcgcaccgacac

SEQ ID NO: 2598 - DNA, 127 bp, synthetic construct
  source 1..127: mol_type = other DNA
acatttgttgatacaaccataaaatgattattacacccataaattgataataatgacaccgaatttaactataacgctctgatcatagtcagaccaacattgctacgacccgtattcgcaccgacac

SEQ ID NO: 2599 - DNA, 127 bp, synthetic construct
  source 1..127: mol_type = other DNA
acatttgttgatacaaccataaaatgattattacacccataaattgataatgatgacaccgaatttaactataacgctctgatcatagtcagaccaacattgctacgacccgtattcgcaccgacac

SEQ ID NO: 2600 - DNA, 127 bp, synthetic construct
  source 1..127: mol_type = other DNA
acatttgttgatacaaccataaaatgataaatacacccataaattgataattgtgacaccgaatttaactataacgctctgatcatagtcagaccaacattgctacgacccgtattcgcaccgacac

SEQ ID NO: 2601 - DNA, 127 bp, synthetic construct
  source 1..127: mol_type = other DNA
acatttgttgatacaaccataaaatgataaatacacccataaattgataataatgacaccgaatttaactataacgctctgatcatagtcagaccaacattgctacgacccgtattcgcaccgacac

SEQ ID NO: 2602 - DNA, 127 bp, synthetic construct
  source 1..127: mol_type = other DNA
acatttgttgatacaaccataaaatgataaatacacccataaattgataatgatgacaccgaatttaactataacgctctgatcatagtcagaccaacattgctacgacccgtattcgcaccgacac

SEQ ID NO: 2603 - DNA, 127 bp, synthetic construct
  source 1..127: mol_type = other DNA
acatttgttgatacaaccataaaatgataattacccccataaattgataattgtgacaccgaatttaactataacgctctgatcatagtcagaccaacattgctacgacccgtattcgcaccgacac

SEQ ID NO: 2604 - DNA, 127 bp, synthetic construct
  source 1..127: mol_type = other DNA
acatttgttgatacaaccataaaatgataattacccccataaattgataataatgacaccgaatttaactataacgctctgatcatagtcagaccaacattgctacgacccgtattcgcaccgacac

SEQ ID NO: 2605 - DNA, 127 bp, synthetic construct
  source 1..127: mol_type = other DNA
acatttgttgatacaaccataaaatgataattacccccataaattgataatgatgacaccgaatttaactataacgctctgatcatagtcagaccaacattgctacgacccgtattcgcaccgacac

SEQ ID NO: 2606 - DNA, 127 bp, synthetic construct
  source 1..127: mol_type = other DNA
acatttgttgatacaaccataaaatgataattacacccattaattgataattgtgacaccgaatttaactataacgctctgatcatagtcagaccaacattgctacgacccgtattcgcaccgacac

SEQ ID NO: 2607 - DNA, 127 bp, synthetic construct
  source 1..127: mol_type = other DNA
acatttgttgatacaaccataaaatgataattacacccattaattgataataatgacaccgaatttaactataacgctctgatcatagtcagaccaacattgctacgacccgtattcgcaccgacac

SEQ ID NO: 2608 - DNA, 127 bp, synthetic construct
  source 1..127: mol_type = other DNA
acatttgttgatacaaccataaaatgataattacacccattaattgataatgatgacaccgaatttaactataacgctctgatcatagtcagaccaacattgctacgacccgtattcgcaccgacac

SEQ ID NO: 2609 - DNA, 127 bp, synthetic construct
  source 1..127: mol_type = other DNA
acatttgttgatacaaccaataaatgataattacacccataaattgataattgtgacaccgaatttaactataacgctctgatcatagtcagaccaacattgctacgacccgtattcgcaccgacac

SEQ ID NO: 2610 - DNA, 127 bp, synthetic construct
  source 1..127: mol_type = other DNA
acatttgttgatacaaccaataaatgataattacacccataaattgataataatgacaccgaatttaactataacgctctgatcatagtcagaccaacattgctacgacccgtattcgcaccgacac

SEQ ID NO: 2611 - DNA, 127 bp, synthetic construct
  source 1..127: mol_type = other DNA
acatttgttgatacaaccaataaatgataattacacccataaattgataatgatgacaccgaatttaactataacgctctgatcatagtcagaccaacattgctacgacccgtattcgcaccgacac

SEQ ID NO: 2612 - DNA, 127 bp, synthetic construct
  source 1..127: mol_type = other DNA
acatttgttgatacaaccaataaaagataattacacccataaattgataattgtgacaccgaatttaactataacgctctgatcatagtcagaccaacattgctacgacccgtattcgcaccgacac

SEQ ID NO: 2613 - DNA, 127 bp, synthetic construct
  source 1..127: mol_type = other DNA
acatttgttgatacaaccaataaatgattattacacccataaattgataataatgacaccgaatttaactataacgctctgatcatagtcagaccaacattgctacgacccgtattcgcaccgacac

SEQ ID NO: 2614 - DNA, 127 bp, synthetic construct
  source 1..127: mol_type = other DNA
acatttgttgatacaaccaataaatgataaatacacccataaattgataatgatgacaccgaatttaactataacgctctgatcatagtcagaccaacattgctacgacccgtattcgcaccgacac

SEQ ID NO: 2615 - DNA, 127 bp, synthetic construct
  source 1..127: mol_type = other DNA
acatttgttgatacaaccaataaatgataattacccccataaattgataattgtgacaccgaatttaactataacgctctgatcatagtcagaccaacattgctacgacccgtattcgcaccgacac

SEQ ID NO: 2616 - DNA, 127 bp, synthetic construct
  source 1..127: mol_type = other DNA
acatttgttgatacaaccaataaatgataattacacccattaattgataataatgacaccgaatttaactataacgctctgatcatagtcagaccaacattgctacgacccgtattcgcaccgacac

SEQ ID NO: 2617 - DNA, 127 bp, synthetic construct
  source 1..127: mol_type = other DNA
acatttgttgatacaaccaataaaagattattacccccattaattgataatgatgacaccgaatttaactataacgctctgatcatagtcagaccaacattgctacgacccgtattcgcaccgacac

SEQ ID NO: 2618 - DNA, 127 bp, synthetic construct
  source 1..127: mol_type = other DNA
acatttgttgatacaaccaataaaagattaatacccccattaattgataattgtgacaccgaatttaactataacgctctgatcatagtcagaccaacattgctacgacccgtattcgcaccgacac

SEQ ID NO: 2619 - DNA, 127 bp, synthetic construct
  source 1..127: mol_type = other DNA
acatttgttgatacaaccataaaatgataattacacccataaattgataattattacacccaatttaactataacgctctgatcatagtcagaccaacattgctacgacccgtattcgcaccgacac

SEQ ID NO: 2620 - DNA, 127 bp, synthetic construct
  source 1..127: mol_type = other DNA
acatttgttgatacaaccataaaatgataattacacccataaattgataattaacacacccaatttaactataacgctctgatcatagtcagaccaacattgctacgacccgtattcgcaccgacac

SEQ ID NO: 2621 - DNA, 127 bp, synthetic construct
  source 1..127: mol_type = other DNA
acatttgttgatacaaccataaaatgataattacacccataaattgataattagcacacccaatttaactataacgctctgatcatagtcagaccaacattgctacgacccgtattcgcaccgacac

SEQ ID NO: 2622 - DNA, 127 bp, synthetic construct
  source 1..127: mol_type = other DNA
acatttgttgatacaaccataaaatgataattacacccataaattgataattaccacacccaatttaactataacgctctgatcatagtcagaccaacattgctacgacccgtattcgcaccgacac

SEQ ID NO: 2623 - DNA, 127 bp, synthetic construct
  source 1..127: mol_type = other DNA
acatttgttgatacaaccataaaatgataattacacccataaattgataaatatcacacccaatttaactataacgctctgatcatagtcagaccaacattgctacgacccgtattcgcaccgacac

SEQ ID NO: 2624 - DNA, 127 bp, synthetic construct
  source 1..127: mol_type = other DNA
acatttgttgatacaaccataaaatgataattacacccataaattgataagtatcacacccaatttaactataacgctctgatcatagtcagaccaacattgctacgacccgtattcgcaccgacac

SEQ ID NO: 2625 - DNA, 127 bp, synthetic construct
  source 1..127: mol_type = other DNA
acatttgttgatacaaccataaaatgataattacacccataaattgataactatcacacccaatttaactataacgctctgatcatagtcagaccaacattgctacgacccgtattcgcaccgacac

SEQ ID NO: 2626 - DNA, 127 bp, synthetic construct
  source 1..127: mol_type = other DNA
acatttgttgatacaaccataaaatgataattacacccataaattgagaattatcacacccaatttaactataacgctctgatcatagtcagaccaacattgctacgacccgtattcgcaccgacac

SEQ ID NO: 2627 - DNA, 127 bp, synthetic construct
  source 1..127: mol_type = other DNA
acatttgttgatacaaccataaaatgataattacacccataaatagataattatcacacccaatttaactataacgctctgatcatagtcagaccaacattgctacgacccgtattcgcaccgacac

SEQ ID NO: 2628 - DNA, 127 bp, synthetic construct
  source 1..127: mol_type = other DNA
acatttgttgatacaaccataaaatgataattacacccatagattgataattatcacacccaatttaactataacgctctgatcatagtcagaccaacattgctacgacccgtattcgcaccgacac

SEQ ID NO: 2629 - DNA, 127 bp, synthetic construct
  source 1..127: mol_type = other DNA
acatttgttgatacaaccataaaatgataattacacccgtaaattgataattatcacacccaatttaactataacgctctgatcatagtcagaccaacattgctacgacccgtattcgcaccgacac

SEQ ID NO: 2630 - DNA, 127 bp, synthetic construct
  source 1..127: mol_type = other DNA
acatttgttgatacaaccataaaatgataattacaccgataaattgataattatcacacccaatttaactataacgctctgatcatagtcagaccaacattgctacgacccgtattcgcaccgacac

SEQ ID NO: 2631 - DNA, 127 bp, synthetic construct
  source 1..127: mol_type = other DNA
acatttgttgatacaaccataaaatgataattacacctataaattgataattatcacacccaatttaactataacgctctgatcatagtcagaccaacattgctacgacccgtattcgcaccgacac

SEQ ID NO: 2632 - DNA, 127 bp, synthetic construct
  source 1..127: mol_type = other DNA
acatttgttgattcaaccataaaatgataattacacccataaattgataattatcacacccaatttaactataacgctctgatcatagtcagaccaacattgctacgacccgtattcgcaccgacac

SEQ ID NO: 2633 - DNA, 127 bp, synthetic construct
  source 1..127: mol_type = other DNA
acatttgttgagacaaccataaaatgataattacacccataaattgataattatcacacccaatttaactataacgctctgatcatagtcagaccaacattgctacgacccgtattcgcaccgacac

SEQ ID NO: 2634 - DNA, 127 bp, synthetic construct
  source 1..127: mol_type = other DNA
acatttgtagatacaaccataaaatgataattacacccataaattgataattatcacacccaatttaactataacgctctgatcatagtcagaccaacattgctacgacccgtattcgcaccgacac

SEQ ID NO: 2635 - DNA, 127 bp, synthetic construct
  source 1..127: mol_type = other DNA
acatttgttgatacaaccataaaatgataattacacccataaattgataattaccactcccaatttaactataacgctctgatcatagtcagaccaacattgctacgacccgtattcgcaccgacac

SEQ ID NO: 2636 - DNA, 127 bp, synthetic construct
  source 1..127: mol_type = other DNA
acatttgttgatacaaccataaaatgataattacacccataatttgataattaccactcccaatttaactataacgctctgatcatagtcagaccaacattgctacgacccgtattcgcaccgacac

SEQ ID NO: 2637 - DNA, 127 bp, synthetic construct
  source 1..127: mol_type = other DNA
acatttgttgatacaaccataaaatgataattacacccataaaatgataattatcacacccaatttaactataacgctctgatcatagtcagaccaacattgctacgacccgtattcgcaccgacac

SEQ ID NO: 2638 - DNA, 127 bp, synthetic construct
  source 1..127: mol_type = other DNA
acatttgttgatacaaccataaaatgataattacacccataaagtgataattatcacacccaatttaactataacgctctgatcatagtcagaccaacattgctacgacccgtattcgcaccgacac

SEQ ID NO: 2639 - DNA, 127 bp, synthetic construct
  source 1..127: mol_type = other DNA
acatttgttgatacaaccataaaatgataattacacccataaactgataattatcacacccaatttaactataacgctctgatcatagtcagaccaacattgctacgacccgtattcgcaccgacac

SEQ ID NO: 2640 - DNA, 127 bp, synthetic construct
  source 1..127: mol_type = other DNA
acatttgttgatacaaccataaaatgataattgcacccataaattgataattatcacacccaatttaactataacgctctgatcatagtcagaccaacattgctacgacccgtattcgcaccgacac

SEQ ID NO: 2641 - DNA, 127 bp, synthetic construct
  source 1..127: mol_type = other DNA
acatttgttgatacaaccataaaatgataatgacacccataaattgataattatcacacccaatttaactataacgctctgatcatagtcagaccaacattgctacgacccgtattcgcaccgacac

SEQ ID NO: 2642 - DNA, 127 bp, synthetic construct
  source 1..127: mol_type = other DNA
acatttgttgatagaaccataaaatgataattacacccataaattgataattatcacacccaatttaactataacgctctgatcatagtcagaccaacattgctacgacccgtattcgcaccgacac

SEQ ID NO: 2643 - DNA, 127 bp, synthetic construct
  source 1..127: mol_type = other DNA
acatttgatgatacaaccataaaatgataattacacccataaattgataattatcacacccaatttaactataacgctctgatcatagtcagaccaacattgctacgacccgtattcgcaccgacac

SEQ ID NO: 2644 - DNA, 127 bp, synthetic construct
  source 1..127: mol_type = other DNA
acatttggtgatacaaccataaaatgataattacacccataaattgataattatcacacccaatttaactataacgctctgatcatagtcagaccaacattgctacgacccgtattcgcaccgacac

SEQ ID NO: 2645 - DNA, 127 bp, synthetic construct
  source 1..127: mol_type = other DNA
acatttgctgatacaaccataaaatgataattacacccataaattgataattatcacacccaatttaactataacgctctgatcatagtcagaccaacattgctacgacccgtattcgcaccgacac

SEQ ID NO: 2646 - DNA, 127 bp, synthetic construct
  source 1..127: mol_type = other DNA
acatttgttgatacaaccataaaatgataataacacccataaaatgataattatcacacccaatttaactataacgctctgatcatagtcagaccaacattgctacgacccgtattcgcaccgacac

SEQ ID NO: 2647 - DNA, 127 bp, synthetic construct
  source 1..127: mol_type = other DNA
acatttgttgatacaaccatataatgataataacacccataaaatgataattatcacacccaatttaactataacgctctgatcatagtcagaccaacattgctacgacccgtattcgcaccgacac

SEQ ID NO: 2648 - DNA, 127 bp, synthetic construct
  source 1..127: mol_type = other DNA
acatttgttgatacaaccatttaatgataataacacccataaaatgataattatcacacccaatttaactataacgctctgatcatagtcagaccaacattgctacgacccgtattcgcaccgacac

SEQ ID NO: 2649 - DNA, 127 bp, synthetic construct
  source 1..127: mol_type = other DNA
acatttgttgatactaccatataatgataataacacccataaaatgataattatcacacccaatttaactataacgctctgatcatagtcagaccaacattgctacgacccgtattcgcaccgacac

SEQ ID NO: 2650 - DNA, 127 bp, synthetic construct
  source 1..127: mol_type = other DNA
acatttgttgatagaaccatataatgataataacacccataaaatgataattatcacacccaatttaactataacgctctgatcatagtcagaccaacattgctacgacccgtattcgcaccgacac

SEQ ID NO: 2651 - DNA, 127 bp, synthetic construct
  source 1..127: mol_type = other DNA
acatttgatgatacaaccatataatgataataacacccataaaatgataattatcacacccaatttaactataacgctctgatcatagtcagaccaacattgctacgacccgtattcgcaccgacac

SEQ ID NO: 2652 - DNA, 127 bp, synthetic construct
  source 1..127: mol_type = other DNA
acatttggtgatacaaccatataatgataataacacccataaaatgataattatcacacccaatttaactataacgctctgatcatagtcagaccaacattgctacgacccgtattcgcaccgacac

SEQ ID NO: 2653 - DNA, 127 bp, synthetic construct
  source 1..127: mol_type = other DNA
acatttgctgatacaaccatataatgataataacacccataaaatgataattatcacacccaatttaactataacgctctgatcatagtcagaccaacattgctacgacccgtattcgcaccgacac

SEQ ID NO: 2654 - DNA, 127 bp, synthetic construct
  source 1..127: mol_type = other DNA
acatttgttgatacaaccatataatgataataacacccctaaaatgataattatcacacccaatttaactataacgctctgatcatagtcagaccaacattgctacgacccgtattcgcaccgacac

SEQ ID NO: 2655 - DNA, 127 bp, synthetic construct
  source 1..127: mol_type = other DNA
acatttgttgatacaaccatataatgataataacaccaataaaatgataattatcacacccaatttaactataacgctctgatcatagtcagaccaacattgctacgacccgtattcgcaccgacac

SEQ ID NO: 2656 - DNA, 127 bp, synthetic construct
  source 1..127: mol_type = other DNA
acatttgttgatacaaccatataatgataataacaccgataaaatgataattatcacacccaatttaactataacgctctgatcatagtcagaccaacattgctacgacccgtattcgcaccgacac

SEQ ID NO: 2657 - DNA, 127 bp, synthetic construct
  source 1..127: mol_type = other DNA
acatttgttgatactaccatttaatgataataacacccataaaatgataattatcacacccaatttaactataacgctctgatcatagtcagaccaacattgctacgacccgtattcgcaccgacac

SEQ ID NO: 2658 - DNA, 127 bp, synthetic construct
  source 1..127: mol_type = other DNA
acatttgttgatagaaccatttaatgataataacacccataaaatgataattatcacacccaatttaactataacgctctgatcatagtcagaccaacattgctacgacccgtattcgcaccgacac

SEQ ID NO: 2659 - DNA, 127 bp, synthetic construct
  source 1..127: mol_type = other DNA
acatttgatgatactaccatttaatgataataacacccataaaatgataattatcacacccaatttaactataacgctctgatcatagtcagaccaacattgctacgacccgtattcgcaccgacac

SEQ ID NO: 2660 - DNA, 127 bp, synthetic construct
  source 1..127: mol_type = other DNA
acatttgatgatagaaccatttaatgataataacacccataaaatgataattatcacacccaatttaactataacgctctgatcatagtcagaccaacattgctacgacccgtattcgcaccgacac

SEQ ID NO: 2661 - DNA, 127 bp, synthetic construct
  source 1..127: mol_type = other DNA
acatttgctgatactaccatttaatgataataacacccataaaatgataattatcacacccaatttaactataacgctctgatcatagtcagaccaacattgctacgacccgtattcgcaccgacac

SEQ ID NO: 2662 - DNA, 127 bp, synthetic construct
  source 1..127: mol_type = other DNA
acatttgctgatagaaccatttaatgataataacacccataaaatgataattatcacacccaatttaactataacgctctgatcatagtcagaccaacattgctacgacccgtattcgcaccgacac

SEQ ID NO: 2663 - DNA, 127 bp, synthetic construct
  source 1..127: mol_type = other DNA
acatttgctgatactaccatataatgataataacacccataaaatgataattatcacacccaatttaactataacgctctgatcatagtcagaccaacattgctacgacccgtattcgcaccgacac

SEQ ID NO: 2664 - DNA, 127 bp, synthetic construct
  source 1..127: mol_type = other DNA
acatttgctgatagaaccatataatgataataacacccataaaatgataattatcacacccaatttaactataacgctctgatcatagtcagaccaacattgctacgacccgtattcgcaccgacac

SEQ ID NO: 2665 - DNA, 127 bp, synthetic construct
  source 1..127: mol_type = other DNA
acatttgctgatactaccatataatgataataacacccctaaaatgataattatcacacccaatttaactataacgctctgatcatagtcagaccaacattgctacgacccgtattcgcaccgacac

SEQ ID NO: 2666 - DNA, 127 bp, synthetic construct
  source 1..127: mol_type = other DNA
acatttgctgatagaaccatataatgataataacaccaataaaatgataattatcacacccaatttaactataacgctctgatcatagtcagaccaacattgctacgacccgtattcgcaccgacac

SEQ ID NO: 2667 - DNA, 127 bp, synthetic construct
  source 1..127: mol_type = other DNA
acatttgctgatactaccatttaatgataataacacccctaaaatgataattatcacacccaatttaactataacgctctgatcatagtcagaccaacattgctacgacccgtattcgcaccgacac

SEQ ID NO: 2668 - DNA, 127 bp, synthetic construct
  source 1..127: mol_type = other DNA
acatttgctgatagaaccatttaatgataataacaccaataaaatgataattatcacacccaatttaactataacgctctgatcatagtcagaccaacattgctacgacccgtattcgcaccgacac

SEQ ID NO: 2669 - DNA, 127 bp, synthetic construct
  source 1..127: mol_type = other DNA
acatttgttgatacaaccataaaatgataattacacccataaattgataattatcacacccataaattgatattgccaaccataaaatgataattactctgatcatagtcagaccaagcaccgacac

SEQ ID NO: 2670 - DNA, 127 bp, synthetic construct
  source 1..127: mol_type = other DNA
acatttgttgatacaaccataaaatgataattacacccataaattgataattatcacacccataaattgatattgcccaaccataaaatgataattatctgatcatagtcagaccaagcaccgacac

SEQ ID NO: 2671 - DNA, 127 bp, synthetic construct
  source 1..127: mol_type = other DNA
acatttgttgatacaaccataaaatgataattacacccataaattgataattatcacacccataaattgatattgcctcaaccataaaatgataattactgatcatagtcagaccaagcaccgacac

SEQ ID NO: 2672 - DNA, 127 bp, synthetic construct
  source 1..127: mol_type = other DNA
acatttgttgatacaaccataaaatgataattacacccataaattgataattatcacacccataaattgatattgcctccaaccataaaatgataattatgatcatagtcagaccaagcaccgacac

SEQ ID NO: 2673 - DNA, 127 bp, synthetic construct
  source 1..127: mol_type = other DNA
acatttgttgatacaaccataaaatgataattacacccataaattgataattatcacacccataaattgatattgcctctcaaccataaaatgataattagatcatagtcagaccaagcaccgacac

SEQ ID NO: 2674 - DNA, 127 bp, synthetic construct
  source 1..127: mol_type = other DNA
acatttgttgatacaaccataaaatgataattacacccataaattgataattatcacacccataaattgatattgcctctgcaaccataaaatgataattaatcatagtcagaccaagcaccgacac

SEQ ID NO: 2675 - DNA, 127 bp, synthetic construct
  source 1..127: mol_type = other DNA
acatttgttgatacaaccataaaatgataattacacccataaattgataattatcacacccataaattgatattgcctctgacaaccataaaatgataattatcatagtcagaccaagcaccgacac

SEQ ID NO: 2676 - DNA, 127 bp, synthetic construct
  source 1..127: mol_type = other DNA
acatttgttgatacaaccataaaatgataattacacccataaattgataattatcacacccataaattgatattgcctctgatcaaccataaaatgataattacatagtcagaccaagcaccgacac

SEQ ID NO: 2677 - DNA, 127 bp, synthetic construct
  source 1..127: mol_type = other DNA
acatttgttgatacaaccataaaatgataattacacccataaattgataattatcacacccataaattgatattgcctctgatccaaccataaaatgataattaatagtcagaccaagcaccgacac

SEQ ID NO: 2678 - DNA, 127 bp, synthetic construct
  source 1..127: mol_type = other DNA
acatttgttgatacaaccataaaatgataattacacccataaattgataattatcacacccataaattgatattgcctctgatcacaaccataaaatgataattatagtcagaccaagcaccgacac

SEQ ID NO: 2679 - DNA, 127 bp, synthetic construct
  source 1..127: mol_type = other DNA
acatttgttgatacaaccataaaatgataattacacccataaattgataattatcacacccataaattgatattgcctctgatcatcaaccataaaatgataattaagtcagaccaagcaccgacac

SEQ ID NO: 2680 - DNA, 127 bp, synthetic construct
  source 1..127: mol_type = other DNA
acatttgttgatacaaccataaaatgataattacacccataaattgataattatcacacccataaattgatattgcctctgatcatacaaccataaaatgataattagtcagaccaagcaccgacac

SEQ ID NO: 2681 - DNA, 127 bp, synthetic construct
  source 1..127: mol_type = other DNA
acatttgttgatacaaccataaaatgataattacacccataaattgataattatcacacccataaattgatattgcctctgatcatagcaaccataaaatgataattatcagaccaagcaccgacac

SEQ ID NO: 2682 - DNA, 127 bp, synthetic construct
  source 1..127: mol_type = other DNA
acatttgttgatacaaccataaaatgataattacacccataaattgataattatcacacccataaattgatattgcctctgatcatagtcaaccataaaatgataattacagaccaagcaccgacac

SEQ ID NO: 2683 - DNA, 127 bp, synthetic construct
  source 1..127: mol_type = other DNA
acatttgttgatacaaccataaaatgataattacacccataaattgataattatcacacccataaattgatattgcctctgatcatagtccaaccataaaatgataattaagaccaagcaccgacac

SEQ ID NO: 2684 - DNA, 127 bp, synthetic construct
  source 1..127: mol_type = other DNA
acatttgttgatacaaccataaaatgataattacacccataaattgataattatcacacccataaattgatattgcctctgatcatagtcacaaccataaaatgataattagaccaagcaccgacac

SEQ ID NO: 2685 - DNA, 127 bp, synthetic construct
  source 1..127: mol_type = other DNA
acatttgttgatacaaccataaaatgataattacacccataaattgataattatcacacccataaattgatattgcctctgatcatagtcagcaaccataaaatgataattaaccaagcaccgacac

SEQ ID NO: 2686 - DNA, 127 bp, synthetic construct
  source 1..127: mol_type = other DNA
acatttgttgatacaaccataaaatgataattacacccataaattgataattatcacacccataaattgatattgcctctgatcatagtcagacaaccataaaatgataattaccaagcaccgacac

SEQ ID NO: 2687 - DNA, 127 bp, synthetic construct
  source 1..127: mol_type = other DNA
acatttgttgatacaaccataaaatgataattacacccataaattgataattatcacacccataaattgatattgcctctgatcatagtcagaccaaccataaaatgataattacaagcaccgacac

SEQ ID NO: 2688 - DNA, 127 bp, synthetic construct
  source 1..127: mol_type = other DNA
acatttgttgatacaaccataaaatgataattacacccataaattgataattatcacacccataaattgatattgcctctgatcatagtcagacccaaccataaaatgataattaaagcaccgacac

SEQ ID NO: 2689 - DNA, 127 bp, synthetic construct
  source 1..127: mol_type = other DNA
acatttgttgatacaaccataaaatgataattacacccataaattgataattatcacacccataaattgatattgcctctgatcatagtcagaccacaaccataaaatgataattaagcaccgacac

SEQ ID NO: 2690 - DNA, 127 bp, synthetic construct
  source 1..127: mol_type = other DNA
acatttgttgatacaaccataaaatgataattacacccataaattgataattatcacacccataaattgatattgcctctgatcatagtcagaccaacaaccataaaatgataattagcaccgacac

SEQ ID NO: 2691 - DNA, 127 bp, synthetic construct; identical to SEQ ID NO: 1500
  source 1..127: mol_type = other DNA

SEQ ID NO: 2692 - DNA, 127 bp, synthetic construct; identical to SEQ ID NO: 1492
  source 1..127: mol_type = other DNA

SEQ ID NO: 2693 - DNA, 127 bp, synthetic construct; identical to SEQ ID NO: 1490
  source 1..127: mol_type = other DNA

SEQ ID NO: 2694 - DNA, 127 bp, synthetic construct; identical to SEQ ID NO: 1498
  source 1..127: mol_type = other DNA

SEQ ID NO: 2695 - DNA, 127 bp, synthetic construct; identical to SEQ ID NO: 1467
  source 1..127: mol_type = other DNA

SEQ ID NO: 2696 - DNA, 127 bp, synthetic construct; identical to SEQ ID NO: 1456
  source 1..127: mol_type = other DNA

SEQ ID NO: 2697 - DNA, 127 bp, synthetic construct; identical to SEQ ID NO: 1463
  source 1..127: mol_type = other DNA

SEQ ID NO: 2698 - DNA, 127 bp, synthetic construct; identical to SEQ ID NO: 1462
  source 1..127: mol_type = other DNA

SEQ ID NO: 2699 - DNA, 127 bp, synthetic construct; identical to SEQ ID NO: 1461
  source 1..127: mol_type = other DNA

SEQ ID NO: 2700 - DNA, 127 bp, synthetic construct; identical to SEQ ID NO: 1460
  source 1..127: mol_type = other DNA

SEQ ID NO: 2701 - DNA, 127 bp, synthetic construct; identical to SEQ ID NO: 1459
  source 1..127: mol_type = other DNA

SEQ ID NO: 2702 - DNA, 127 bp, synthetic construct; identical to SEQ ID NO: 1458
  source 1..127: mol_type = other DNA

SEQ ID NO: 2703 - DNA, 250 bp, synthetic construct
  source 1..250: mol_type = other DNA
gtatgtgcagctaactctcctcgccgcagccgaacgaccgagcgcagcgagtcagtgagcgaggaagcgtctagtgtcgctgcaaccatagtttgacataatgcaaccataccttgacataattaaagtcatactctgacataaagccccttattaaaaatgatgctaaaaataaattccattatacatgagctgtcttctctgctacacatgaactcgcaagggtcgtgaagtcggttccttcaatggt

SEQ ID NO: 2704 - DNA, 250 bp, synthetic construct
  source 1..250: mol_type = other DNA
gtatgtgcagctaactctcctcgccgcagccgaacgaccgagcgcagcgagtcagtgagcgaggaagcgtctagtgtcgcagcaaccatagtttgacataaagcaaccataccttgacataataaaagtcatactctgacataaagccccttattaaaaatgatgctaaaaataaattccattaaacgcaattcgtcttctctgctacacatgaactcgcaagggtcgtgaagtcggttccttcaatggt

SEQ ID NO: 2705 - DNA, 250 bp, synthetic construct
  source 1..250: mol_type = other DNA
gtatgtgcagctaactctcctcgccgcagccgaacgaccgagcgcagcgagtcagtgagcgaggaagcgtctagtgtcgctccaaccatagtttgacataatccaaccataccttgacataatttaagtcatactctgacataaagccccttattaaaaatgatgctaaaaataaattccattatgggctttaggtcttctctgctacacatgaactcgcaagggtcgtgaagtcggttccttcaatggt

SEQ ID NO: 2706 - DNA, 250 bp, synthetic construct
  source 1..250: mol_type = other DNA
gtatgtgcagctaactctcctcgccgcagccgaacgaccgagcgcagcgagtcagtgagcgaggaagcgtctagtgtcgctggaaccatagtttgacataatggaaccataccttgacataattatagtcatactctgacataaagccccttattaaaaatgatgctaaaaataaattccattatggctaaaaggtcttctctgctacacatgaactcgcaagggtcgtgaagtcggttccttcaatggt

SEQ ID NO: 2707 - DNA, 250 bp, synthetic construct
  source 1..250: mol_type = other DNA
gtatgtgcagctaactctcctcgccgcagccgaacgaccgagcgcagcgagtcagtgagcgaggaagcgtctagtgtcgctgctaccatagtttgacataatgctaccataccttgacataattaatgtcatactctgacataaagccccttattaaaaatgatgctaaaaataaattccattacttaaagcgtgtcttctctgctacacatgaactcgcaagggtcgtgaagtcggttccttcaatggt

SEQ ID NO: 2708 - DNA, 250 bp, synthetic construct
  source 1..250: mol_type = other DNA
gtatgtgcagctaactctcctcgccgcagccgaacgaccgagcgcagcgagtcagtgagcgaggaagcgtctagtgtcgctgcatccatagtttgacataatgcatccataccttgacataattaaactcatactctgacataaagccccttattaaaaatgatgctaaaaataaattccattattgacgggacgtcttctctgctacacatgaactcgcaagggtcgtgaagtcggttccttcaatggt

SEQ ID NO: 2709 - DNA, 250 bp, synthetic construct
  source 1..250: mol_type = other DNA
gtatgtgcagctaactctcctcgccgcagccgaacgaccgagcgcagcgagtcagtgagcgaggaagcgtctagtgtcgctgcaagcatagtttgacataatgcaagcataccttgacataattaaagacatactctgacataaagccccttattaaaaatgatgctaaaaataaattccattagccctggccggtcttctctgctacacatgaactcgcaagggtcgtgaagtcggttccttcaatggt

SEQ ID NO: 2710 - DNA, 250 bp, synthetic construct
  source 1..250: mol_type = other DNA
gtatgtgcagctaactctcctcgccgcagccgaacgaccgagcgcagcgagtcagtgagcgaggaagcgtctagtgtcgctgcaacgatagtttgacataatgcaacgataccttgacataattaaagtgatactctgacataaagccccttattaaaaatgatgctaaaaataaattccattaaccccttttggtcttctctgctacacatgaactcgcaagggtcgtgaagtcggttccttcaatggt

SEQ ID NO: 2711 - DNA, 250 bp, synthetic construct
  source 1..250: mol_type = other DNA
gtatgtgcagctaactctcctcgccgcagccgaacgaccgagcgcagcgagtcagtgagcgaggaagcgtctagtgtcgctgcaaccttagtttgacataatgcaaccttaccttgacataattaaagtcttactctgacataaagccccttattaaaaatgatgctaaaaataaattccattaagaagcatgggtcttctctgctacacatgaactcgcaagggtcgtgaagtcggttccttcaatggt

SEQ ID NO: 2712 - DNA, 250 bp, synthetic construct
  source 1..250: mol_type = other DNA
gtatgtgcagctaactctcctcgccgcagccgaacgaccgagcgcagcgagtcagtgagcgaggaagcgtctagtgtcgctgcaaccaaagtttgacataatgcaaccaaaccttgacataattaaagtcaaactctgacataaagccccttattaaaaatgatgctaaaaataaattccattattcgactcgagtcttctctgctacacatgaactcgcaagggtcgtgaagtcggttccttcaatggt

SEQ ID NO: 2713 - DNA, 250 bp, synthetic construct
  source 1..250: mol_type = other DNA
gtatgtgcagctaactctcctcgccgcagccgaacgaccgagcgcagcgagtcagtgagcgaggaagcgtctagtgtcgctgcaaccattgtttgacataatgcaaccattccttgacataattaaagtcattctctgacataaagccccttattaaaaatgatgctaaaaataaattccattatttgcgcaaagtcttctctgctacacatgaactcgcaagggtcgtgaagtcggttccttcaatggt

SEQ ID NO: 2714 - DNA, 250 bp, synthetic construct
  source 1..250: mol_type = other DNA
gtatgtgcagctaactctcctcgccgcagccgaacgaccgagcgcagcgagtcagtgagcgaggaagcgtctagtgtcgctgcaaccatactttgacataatgcaaccatagcttgacataattaaagtcatagtctgacataaagccccttattaaaaatgatgctaaaaataaattccattaacagcgatttgtcttctctgctacacatgaactcgcaagggtcgtgaagtcggttccttcaatggt

SEQ ID NO: 2715 - DNA, 250 bp, synthetic construct
  source 1..250: mol_type = other DNA
gtatgtgcagctaactctcctcgccgcagccgaacgaccgagcgcagcgagtcagtgagcgaggaagcgtctagtgtcgctgcaaccatagattgacataatgcaaccatacgttgacataattaaagtcatacactgacataaagccccttattaaaaatgatgctaaaaataaattccattacgcgttagttgtcttctctgctacacatgaactcgcaagggtcgtgaagtcggttccttcaatggt

SEQ ID NO: 2716 - DNA, 250 bp, synthetic construct
  source 1..250: mol_type = other DNA
gtatgtgcagctaactctcctcgccgcagccgaacgaccgagcgcagcgagtcagtgagcgaggaagcgtctagtgtcgctgcaaccatagtatgacataatgcaaccataccatgacataattaaagtcatactgtgacataaagccccttattaaaaatgatgctaaaaataaattccattatcttaatagcgtcttctctgctacacatgaactcgcaagggtcgtgaagtcggttccttcaatggt

SEQ ID NO: 2717 - DNA, 250 bp, synthetic construct
  source 1..250: mol_type = other DNA
gtatgtgcagctaactctcctcgccgcagccgaacgaccgagcgcagcgagtcagtgagcgaggaagcgtctagtgtcgctgcaaccatagttagacataatgcaaccatacctagacataattaaagtcatactcagacataaagccccttattaaaaatgatgctaaaaataaattccattagtttttcgttgtcttctctgctacacatgaactcgcaagggtcgtgaagtcggttccttcaatggt

SEQ ID NO: 2718 - DNA, 250 bp, synthetic construct
  source 1..250: mol_type = other DNA
gtatgtgcagctaactctcctcgccgcagccgaacgaccgagcgcagcgagtcagtgagcgaggaagcgtctagtgtcgctgcaaccatagtttcacataatgcaaccataccttcacataattaaagtcatactctcacataaagccccttattaaaaatgatgctaaaaataaattccattatcacaggtcagtcttctctgctacacatgaactcgcaagggtcgtgaagtcggttccttcaatggt

SEQ ID NO: 2719 - DNA, 250 bp, synthetic construct
  source 1..250: mol_type = other DNA
gtatgtgcagctaactctcctcgccgcagccgaacgaccgagcgcagcgagtcagtgagcgaggaagcgtctagtgtcgctgcaaccatagtttgtcataatgcaaccataccttgtcataattaaagtcatactctgtcataaagccccttattaaaaatgatgctaaaaataaattccattattggattgaagtcttctctgctacacatgaactcgcaagggtcgtgaagtcggttccttcaatggt

SEQ ID NO: 2720 - DNA, 250 bp, synthetic construct
  source 1..250: mol_type = other DNA
gtatgtgcagctaactctcctcgccgcagccgaacgaccgagcgcagcgagtcagtgagcgaggaagcgtctagtgtcgctgcaaccatagtttgagataatgcaaccataccttgagataattaaagtcatactctgagataaagccccttattaaaaatgatgctaaaaataaattccattaaccgcgaccagtcttctctgctacacatgaactcgcaagggtcgtgaagtcggttccttcaatggt

SEQ ID NO: 2721 - DNA, 250 bp, synthetic construct
  source 1..250: mol_type = other DNA
gtatgtgcagctaactctcctcgccgcagccgaacgaccgagcgcagcgagtcagtgagcgaggaagcgtctagtgtcgctgcaaccatagtttgacttaatgcaaccataccttgacttaattaaagtcatactctgacttaaagccccttattaaaaatgatgctaaaaataaattccattaactacatgtcgtcttctctgctacacatgaactcgcaagggtcgtgaagtcggttccttcaatggt

SEQ ID NO: 2722 - DNA, 250 bp, synthetic construct
  source 1..250: mol_type = other DNA
gtatgtgcagctaactctcctcgccgcagccgaacgaccgagcgcagcgagtcagtgagcgaggaagcgtctagtgtcgctgcaaccatagtttgacaaaatgcaaccataccttgacaaaattaaagtcatactctgacaaaaagccccttattaaaaatgatgctaaaaataaattccattaggtatttgtagtcttctctgctacacatgaactcgcaagggtcgtgaagtcggttccttcaatggt

SEQ ID NO: 2723 - DNA, 250 bp, synthetic construct
  source 1..250: mol_type = other DNA
gtatgtgcagctaactctcctcgccgcagccgaacgaccgagcgcagcgagtcagtgagcgaggaagcgtctagtgtcgctgcaaccatagtttgacattatgcaaccataccttgacattattaaagtcatactctgacattaagccccttattaaaaatgatgctaaaaataaattccattactaaatataggtcttctctgctacacatgaactcgcaagggtcgtgaagtcggttccttcaatggt

SEQ ID NO: 2724 - DNA, 250 bp, synthetic construct
  source 1..250: mol_type = other DNA
gtatgtgcagctaactctcctcgccgcagccgaacgaccgagcgcagcgagtcagtgagcgaggaagcgtctagtgtcgcggcaaccatagtttgacataaggcaaccataccttgacataatgaaagtcatactctgacataaagccccttattaaaaatgatgctaaaaataaattccattagatcttacccgtcttctctgctacacatgaactcgcaagggtcgtgaagtcggttccttcaatggt

SEQ ID NO: 2725 - DNA, 250 bp, synthetic construct
  source 1..250: mol_type = other DNA
gtatgtgcagctaactctcctcgccgcagccgaacgaccgagcgcagcgagtcagtgagcgaggaagcgtctagtgtcgcttcaaccatagtttgacataattcaaccataccttgacataattcaagtcatactctgacataaagccccttattaaaaatgatgctaaaaataaattccattaaactactctggtcttctctgctacacatgaactcgcaagggtcgtgaagtcggttccttcaatggt

SEQ ID NO: 2726 - DNA, 250 bp, synthetic construct
  source 1..250: mol_type = other DNA
gtatgtgcagctaactctcctcgccgcagccgaacgaccgagcgcagcgagtcagtgagcgaggaagcgtctagtgtcgctgaaaccatagtttgacataatgaaaccataccttgacataattacagtcatactctgacataaagccccttattaaaaatgatgctaaaaataaattccattagagctgttatgtcttctctgctacacatgaactcgcaagggtcgtgaagtcggttccttcaatggt

SEQ ID NO: 2727 - DNA, 250 bp, synthetic construct
  source 1..250: mol_type = other DNA
gtatgtgcagctaactctcctcgccgcagccgaacgaccgagcgcagcgagtcagtgagcgaggaagcgtctagtgtcgctgccaccatagtttgacataatgccaccataccttgacataattaacgtcatactctgacataaagccccttattaaaaatgatgctaaaaataaattccattaaactttccatgtcttctctgctacacatgaactcgcaagggtcgtgaagtcggttccttcaatggt

SEQ ID NO: 2728 - DNA, 250 bp, synthetic construct
  source 1..250: mol_type = other DNA
gtatgtgcagctaactctcctcgccgcagccgaacgaccgagcgcagcgagtcagtgagcgaggaagcgtctagtgtcgctgcacccatagtttgacataatgcacccataccttgacataattaaattcatactctgacataaagccccttattaaaaatgatgctaaaaataaattccattagaagtcttctgtcttctctgctacacatgaactcgcaagggtcgtgaagtcggttccttcaatggt

SEQ ID NO: 2729 - DNA, 250 bp, synthetic construct
  source 1..250: mol_type = other DNA
gtatgtgcagctaactctcctcgccgcagccgaacgaccgagcgcagcgagtcagtgagcgaggaagcgtctagtgtcgctgcaaacatagtttgacataatgcaaacataccttgacataattaaaggcatactctgacataaagccccttattaaaaatgatgctaaaaataaattccattaaaacctctaggtcttctctgctacacatgaactcgcaagggtcgtgaagtcggttccttcaatggt

SEQ ID NO: 2730 - DNA, 250 bp, synthetic construct
  source 1..250: mol_type = other DNA
gtatgtgcagctaactctcctcgccgcagccgaacgaccgagcgcagcgagtcagtgagcgaggaagcgtctagtgtcgctgcaacaatagtttgacataatgcaacaataccttgacataattaaagtaatactctgacataaagccccttattaaaaatgatgctaaaaataaattccattatgcccattgagtcttctctgctacacatgaactcgcaagggtcgtgaagtcggttccttcaatggt

SEQ ID NO: 2731 - DNA, 250 bp, synthetic construct
  source 1..250: mol_type = other DNA
gtatgtgcagctaactctcctcgccgcagccgaacgaccgagcgcagcgagtcagtgagcgaggaagcgtctagtgtcgctgcaaccctagtttgacataatgcaaccctaccttgacataattaaagtcctactctgacataaagccccttattaaaaatgatgctaaaaataaattccattaagatccttcagtcttctctgctacacatgaactcgcaagggtcgtgaagtcggttccttcaatggt

SEQ ID NO: 2732 - DNA, 250 bp, synthetic construct
  source 1..250: mol_type = other DNA
gtatgtgcagctaactctcctcgccgcagccgaacgaccgagcgcagcgagtcagtgagcgaggaagcgtctagtgtcgctgcaaccagagtttgacataatgcaaccagaccttgacataattaaagtcagactctgacataaagccccttattaaaaatgatgctaaaaataaattccattacgtaagccgggtcttctctgctacacatgaactcgcaagggtcgtgaagtcggttccttcaatggt

SEQ ID NO: 2733 - DNA, 250 bp, synthetic construct
  source 1..250: mol_type = other DNA
gtatgtgcagctaactctcctcgccgcagccgaacgaccgagcgcagcgagtcagtgagcgaggaagcgtctagtgtcgctgcaaccatcgtttgacataatgcaaccatcccttgacataattaaagtcatcctctgacataaagccccttattaaaaatgatgctaaaaataaattccattacccgccggcagtcttctctgctacacatgaactcgcaagggtcgtgaagtcggttccttcaatggt

SEQ ID NO: 2734 - DNA, 250 bp, synthetic construct
  source 1..250: mol_type = other DNA
gtatgtgcagctaactctcctcgccgcagccgaacgaccgagcgcagcgagtcagtgagcgaggaagcgtctagtgtcgctgcaaccatattttgacataatgcaaccataacttgacataattaaagtcataatctgacataaagccccttattaaaaatgatgctaaaaataaattccattagtagatttctgtcttctctgctacacatgaactcgcaagggtcgtgaagtcggttccttcaatggt

SEQ ID NO: 2735 - DNA, 250 bp, synthetic construct
  source 1..250: mol_type = other DNA
gtatgtgcagctaactctcctcgccgcagccgaacgaccgagcgcagcgagtcagtgagcgaggaagcgtctagtgtcgctgcaaccataggttgacataatgcaaccatacattgacataattaaagtcatacgctgacataaagccccttattaaaaatgatgctaaaaataaattccattacgcaattaacgtcttctctgctacacatgaactcgcaagggtcgtgaagtcggttccttcaatggt

SEQ ID NO: 2736 - DNA, 250 bp, synthetic construct
  source 1..250: mol_type = other DNA
gtatgtgcagctaactctcctcgccgcagccgaacgaccgagcgcagcgagtcagtgagcgaggaagcgtctagtgtcgctgcaaccatagtgtgacataatgcaaccataccgtgacataattaaagtcatactatgacataaagccccttattaaaaatgatgctaaaaataaattccattagctccaaactgtcttctctgctacacatgaactcgcaagggtcgtgaagtcggttccttcaatggt

SEQ ID NO: 2737 - DNA, 250 bp, synthetic construct
  source 1..250: mol_type = other DNA
gtatgtgcagctaactctcctcgccgcagccgaacgaccgagcgcagcgagtcagtgagcgaggaagcgtctagtgtcgctgcaaccatagttggacataatgcaaccatacctggacataattaaagtcatactcggacataaagccccttattaaaaatgatgctaaaaataaattccattaactaaaaggagtcttctctgctacacatgaactcgcaagggtcgtgaagtcggttccttcaatggt

SEQ ID NO: 2738 - DNA, 250 bp, synthetic construct
  source 1..250: mol_type = other DNA
gtatgtgcagctaactctcctcgccgcagccgaacgaccgagcgcagcgagtcagtgagcgaggaagcgtctagtgtcgctgcaaccatagttttacataatgcaaccatacctttacataattaaagtcatactcttacataaagccccttattaaaaatgatgctaaaaataaattccattactgggatggggtcttctctgctacacatgaactcgcaagggtcgtgaagtcggttccttcaatggt

SEQ ID NO: 2739 - DNA, 250 bp, synthetic construct
  source 1..250: mol_type = other DNA
gtatgtgcagctaactctcctcgccgcagccgaacgaccgagcgcagcgagtcagtgagcgaggaagcgtctagtgtcgctgcaaccatagtttgccataatgcaaccataccttgccataattaaagtcatactctgccataaagccccttattaaaaatgatgctaaaaataaattccattatgagcgtggggtcttctctgctacacatgaactcgcaagggtcgtgaagtcggttccttcaatggt

SEQ ID NO: 2740 - DNA, 250 bp, synthetic construct
  source 1..250: mol_type = other DNA
gtatgtgcagctaactctcctcgccgcagccgaacgaccgagcgcagcgagtcagtgagcgaggaagcgtctagtgtcgctgcaaccatagtttgaaataatgcaaccataccttgaaataattaaagtcatactctgaaataaagccccttattaaaaatgatgctaaaaataaattccattaatggctttttgtcttctctgctacacatgaactcgcaagggtcgtgaagtcggttccttcaatggt

SEQ ID NO: 2741 - DNA, 250 bp, synthetic construct
  source 1..250: mol_type = other DNA
gtatgtgcagctaactctcctcgccgcagccgaacgaccgagcgcagcgagtcagtgagcgaggaagcgtctagtgtcgctgcaaccatagtttgacctaatgcaaccataccttgacctaattaaagtcatactctgacctaaagccccttattaaaaatgatgctaaaaataaattccattatggtcgagtagtcttctctgctacacatgaactcgcaagggtcgtgaagtcggttccttcaatggt

SEQ ID NO: 2742 - DNA, 250 bp, synthetic construct
  source 1..250: mol_type = other DNA
gtatgtgcagctaactctcctcgccgcagccgaacgaccgagcgcagcgagtcagtgagcgaggaagcgtctagtgtcgctgcaaccatagtttgacagaatgcaaccataccttgacagaattaaagtcatactctgacagaaagccccttattaaaaatgatgctaaaaataaattccattaaacggcgtcggtcttctctgctacacatgaactcgcaagggtcgtgaagtcggttccttcaatggt

SEQ ID NO: 2743 - DNA, 250 bp, synthetic construct
  source 1..250: mol_type = other DNA
gtatgtgcagctaactctcctcgccgcagccgaacgaccgagcgcagcgagtcagtgagcgaggaagcgtctagtgtcgctgcaaccatagtttgacatcatgcaaccataccttgacatcattaaagtcatactctgacatcaagccccttattaaaaatgatgctaaaaataaattccattaagattattccgtcttctctgctacacatgaactcgcaagggtcgtgaagtcggttccttcaatggt

SEQ ID NO: 2744 - DNA, 250 bp, synthetic construct
  source 1..250: mol_type = other DNA
gtatgtgcagctaactctcctcgccgcagccgaacgaccgagcgcagcgagtcagtgagcgaggaagcgtctagtgtcgctgcaaccatagtttgacataatgcaaccataccttgacataattaaagtcatactctgacataaagctcatggtctaaacttcagtaagtttacgacattttcacagatcaaatgtcttctctgctacacatgaactcgcaagggtcgtgaagtcggttccttcaatggt

SEQ ID NO: 2745 - DNA, 250 bp, synthetic construct
  source 1..250: mol_type = other DNA
gtatgtgcagctaactctcctcgccgcagccgaacgaccgagcgcagcgagtcagtgagcgaggaagcgtctagtgtcgctgcaaccatagtttgacataatgcaaccataccttgacataattaaagtcatactctgacataaagctcatgtgagcccaggcagtaagtttacgacattttcagaggtttatggtcttctctgctacacatgaactcgcaagggtcgtgaagtcggttccttcaatggt

SEQ ID NO: 2746 - DNA, 250 bp, synthetic construct
  source 1..250: mol_type = other DNA
gtatgtgcagctaactctcctcgccgcagccgaacgaccgagcgcagcgagtcagtgagcgaggaagcgtctagtgtcgctgcaaccatagtttgacataatgcaaccataccttgacataattaaagtcatactctgacataaagctcatggtctaaacttcagtcctgggcatcaattttcaggaaggtctagtcttctctgctacacatgaactcgcaagggtcgtgaagtcggttccttcaatggt

SEQ ID NO: 2747 - DNA, 250 bp, synthetic construct
  source 1..250: mol_type = other DNA
gtatgtgcagctaactctcctcgccgcagccgaacgaccgagcgcagcgagtcagtgagcgaggaagcgtctagtgtcgctgcaaccatagtttgacataatgcaaccataccttgacataattaaagtcatactctgacataaagctcatgtgagcccaggcagtcctgggcatcaattttcagaaagttgaggtcttctctgctacacatgaactcgcaagggtcgtgaagtcggttccttcaatggt

SEQ ID NO: 2748 - DNA, 250 bp, synthetic construct
  source 1..250: mol_type = other DNA
gtatgtgcagctaactctcctcgccgcagccgaacgaccgagcgcagcgagtcagtgagcgaggaagcgtctagtgtcgctgcaaccatagtttgacataatgcaaccataccttgacataattaaagtcatactctgacataaagctcatgcagatttgaacagtaagtttacgacattttcaacgtattcctgtcttctctgctacacatgaactcgcaagggtcgtgaagtcggttccttcaatggt

SEQ ID NO: 2749 - DNA, 250 bp, synthetic construct
  source 1..250: mol_type = other DNA
gtatgtgcagctaactctcctcgccgcagccgaacgaccgagcgcagcgagtcagtgagcgaggaagcgtctagtgtcgctgcaaccatagtttgacataatgcaaccataccttgacataattaaagtcatactctgacataaagctcatggtctaaacttcagtttcaaatgctgattttcaaaataccctagtcttctctgctacacatgaactcgcaagggtcgtgaagtcggttccttcaatggt

SEQ ID NO: 2750 - DNA, 250 bp, synthetic construct
  source 1..250: mol_type = other DNA
gtatgtgcagctaactctcctcgccgcagccgaacgaccgagcgcagcgagtcagtgagcgaggaagcgtctagtgtcgctgcaaccatagtttgacataatgcaaccataccttgacataattaaagtcatactctgacataaagctcatgcagatttgaacagtttcaaatgctgattttcatctacaatgggtcttctctgctacacatgaactcgcaagggtcgtgaagtcggttccttcaatggt

SEQ ID NO: 2751 - DNA, 250 bp, synthetic construct
  source 1..250: mol_type = other DNA
gtatgtgcagctaactctcctcgccgcagccgaacgaccgagcgcagcgagtcagtgagcgaggaagcgtctagtgtcgctgcaaccatagtttgacataatgcaaccataccttgacataattaaagtcatactctgacataaagcttgtgagcggataacaagatcatagtcagaccaacatcaaaacgtgggtcttctctgctacacatgaactcgcaagggtcgtgaagtcggttccttcaatggt

SEQ ID NO: 2752 - DNA, 250 bp, synthetic construct
  source 1..250: mol_type = other DNA
gtatgtgcagctaactctcctcgccgcagccgaacgaccgagcgcagcgagtcagtgagcgaggaagcgtctagtgtcgctgcaaccatagtttgacataatgcaaccataccttgacataattaaagtcatactctgacataaagcgatcatagtcttgtgagcggataacaaagaccaacatccatagatacgtcttctctgctacacatgaactcgcaagggtcgtgaagtcggttccttcaatggt

SEQ ID NO: 2753 - DNA, 250 bp, synthetic construct
  source 1..250: mol_type = other DNA
gtatgtgcagctaactctcctcgccgcagccgaacgaccgagcgcagcgagtcagtgagcgaggaagcgtctagtgtcgctgcaaccatagtttgacataatgcaaccataccttgacataattaaagtcatactctgacataaagcgatcatagtcagaccaacatttgtgagcggataacaattacccgggggtcttctctgctacacatgaactcgcaagggtcgtgaagtcggttccttcaatggt

SEQ ID NO: 2754 - DNA, 250 bp, synthetic construct
  source 1..250: mol_type = other DNA
gtatgtgcagctaactctcctcgccgcagccgaacgaccgagcgcagcgagtcagtgagcgaggaagcgtctagtgtcgctgcaaccatagtttgacataatgcaaccataccttgacataattaaagtcatactctgacataaagcgatcaaattgtgagcggataacaatttagtcagaccatggagacacagtcttctctgctacacatgaactcgcaagggtcgtgaagtcggttccttcaatggt

SEQ ID NO: 2755 - DNA, 250 bp, synthetic construct
  source 1..250: mol_type = other DNA
gtatgtgcagctaactctcctcgccgcagccgaacgaccgagcgcagcgagtcagtgagcgaggaagcgtctagtgtcgctgcaaccatagtttgacataatgcaaccataccttgacataattaaagtcatactctgacataaagcgatcaaaatgtgagcgagtaacaacctagtcagaccacgactggatggtcttctctgctacacatgaactcgcaagggtcgtgaagtcggttccttcaatggt

SEQ ID NO: 2756 - DNA, 250 bp, synthetic construct
  source 1..250: mol_type = other DNA
gtatgtgcagctaactctcctcgccgcagccgaacgaccgagcgcagcgagtcagtgagcgaggaagcgtctagtgtcgctgcaaccatagtttgacataatgcaaccataccttgacataattaaagtcatactctgacataaagcgatcaggcagtgagcgcaacgcaatttagtcagaccacgggacatcggtcttctctgctacacatgaactcgcaagggtcgtgaagtcggttccttcaatggt

SEQ ID NO: 2757 - DNA, 250 bp, synthetic construct
  source 1..250: mol_type = other DNA
gtatgtgcagctaactctcctcgccgcagccgaacgaccgagcgcagcgagtcagtgagcgaggaagcgtctagtgtcgctgcaaccatagtttgacataatgcaaccataccttgacataattaaagtcatactctgacataaagcgtttatggctagctcagtcctaggtacaatgctagccggaatcgaacgtcttctctgctacacatgaactcgcaagggtcgtgaagtcggttccttcaatggt

SEQ ID NO: 2758 - DNA, 250 bp, synthetic construct
  source 1..250: mol_type = other DNA
gtatgtgcagctaactctcctcgccgcagccgaacgaccgagcgcagcgagtcagtgagcgaggaagcgtctagtgtcgctgcaaccatagtttgacataatgcaaccataccttgacataattaaagtcatactctgacataaagcgttgacggctagctcagtcctaggtatagtgctagccggatatcgatgtcttctctgctacacatgaactcgcaagggtcgtgaagtcggttccttcaatggt

SEQ ID NO: 2759 - DNA, 250 bp, synthetic construct
  source 1..250: mol_type = other DNA
gtatgtgcagctaactctcctcgccgcagccgaacgaccgagcgcagcgagtcagtgagcgaggaagcgtctagtgtcgctgcaaccatagtttgacataatgcaaccataccttgacataattaaagtcatactctgacataaagcgttgacagctagctcagtcctaggtataatgctagccgtctggtgtggtcttctctgctacacatgaactcgcaagggtcgtgaagtcggttccttcaatggt

SEQ ID NO: 2760 - DNA, 250 bp, synthetic construct
  source 1..250: mol_type = other DNA
gtatgtgcagctaactctcctcgccgcagccgaacgaccgagcgcagcgagtcagtgagcgaggaagcgtctagtgtcgctgcaaccatagtttgacataatgcaaccataccttgacataattaaagtcatactctgacataaagcggctagcattgtacctaggactgagctagccataaacggctaatgcggtcttctctgctacacatgaactcgcaagggtcgtgaagtcggttccttcaatggt

SEQ ID NO: 2761 - DNA, 250 bp, synthetic construct
  source 1..250: mol_type = other DNA
gtatgtgcagctaactctcctcgccgcagccgaacgaccgagcgcagcgagtcagtgagcgaggaagcgtctagtgtcgctgcaaccatagtttgacataatgcaaccataccttgacataattaaagtcatactctgacataaagcggctagcactatacctaggactgagctagccgtcaacgggattcggcgtcttctctgctacacatgaactcgcaagggtcgtgaagtcggttccttcaatggt

SEQ ID NO: 2762 - DNA, 250 bp, synthetic construct
  source 1..250: mol_type = other DNA
gtatgtgcagctaactctcctcgccgcagccgaacgaccgagcgcagcgagtcagtgagcgaggaagcgtctagtgtcgctgcaaccatagtttgacataatgcaaccataccttgacataattaaagtcatactctgacataaagcggctagcattatacctaggactgagctagctgtcaactcatgattccgtcttctctgctacacatgaactcgcaagggtcgtgaagtcggttccttcaatggt

SEQ ID NO: 2763 - DNA, 250 bp, synthetic construct
  source 1..250: mol_type = other DNA
gtatgtgcagctaactctcctcgccgcagccgaacgaccgagcgcagcgagtcagtgagcgaggaagcgtctagtgtcgctgcaaccatagtttgacataatgcaaccataccttgacataattaaagtcatactctgacataaagcgataacttcgtatagcatacattatacgaagttattccccgctgtatgtcttctctgctacacatgaactcgcaagggtcgtgaagtcggttccttcaatggt

SEQ ID NO: 2764 - DNA, 250 bp, synthetic construct
  source 1..250: mol_type = other DNA
gtatgtgcagctaactctcctcgccgcagccgaacgaccgagcgcagcgagtcagtgagcgaggaagcgtctagtgtcgctgcaaccatagtttgacataatgcaaccataccttgacataattaaagtcatactctgacataaagcgataacttcgtatagtataccttatacgaagttattcacttacaaaggtcttctctgctacacatgaactcgcaagggtcgtgaagtcggttccttcaatggt

SEQ ID NO: 2765 - DNA, 250 bp, synthetic construct
  source 1..250: mol_type = other DNA
gtatgtgcagctaactctcctcgccgcagccgaacgaccgagcgcagcgagtcagtgagcgaggaagcgtctagtgtcgctgcaaccatagtttgacataatgcaaccataccttgacataattaaagtcatactctgacataaagcgataacttcgtataggatactttatacgaagttattcgggagattaagtcttctctgctacacatgaactcgcaagggtcgtgaagtcggttccttcaatggt

SEQ ID NO: 2766 - DNA, 250 bp, synthetic construct
  source 1..250: mol_type = other DNA
gtatgtgcagctaactctcctcgccgcagccgaacgaccgagcgcagcgagtcagtgagcgaggaagcgtctagtgtcgctgcaaccatagtttgacataatgcaaccataccttgacataattaaagtcatactctgacataaagcgataacttcgtatagtatacattatacgaagttattcagcccgttgcgtcttctctgctacacatgaactcgcaagggtcgtgaagtcggttccttcaatggt

SEQ ID NO: 2767 - DNA, 250 bp, synthetic construct
  source 1..250: mol_type = other DNA
gtatgtgcagctaactctcctcgccgcagccgaacgaccgagcgcagcgagtcagtgagcgaggaagcgtctagtgtcgctgcaaccatagtttgacataatgcaaccataccttgacataattaaagtcatactctgacataaagcgataacttggtatagcatacattatacgaacggtatcgcatattagcgtcttctctgctacacatgaactcgcaagggtcgtgaagtcggttccttcaatggt

SEQ ID NO: 2768 - DNA, 250 bp, synthetic construct
  source 1..250: mol_type = other DNA
gtatgtgcagctaactctcctcgccgcagccgaacgaccgagcgcagcgagtcagtgagcgaggaagcgtctagtgtcgctgcaaccatagtttgacataatgcaaccataccttgacataattaaagtcatactctgacataaagcgtaccgttcgtatacgatacattatacgaagttattcgacattcagcgtcttctctgctacacatgaactcgcaagggtcgtgaagtcggttccttcaatggt

SEQ ID NO: 2769 - DNA, 250 bp, synthetic construct
  source 1..250: mol_type = other DNA
gtatgtgcagctaactctcctcgccgcagccgaacgaccgagcgcagcgagtcagtgagcgaggaagcgtctagtgtcgctgcaaccatagtttgacataatgcaaccataccttgacataattaaagtcatactctgacataaagcgataacttcgtataatgtatgctatacgaagttattctaaagagatggtcttctctgctacacatgaactcgcaagggtcgtgaagtcggttccttcaatggt

SEQ ID NO: 2770 - DNA, 250 bp, synthetic construct
  source 1..250: mol_type = other DNA
gtatgtgcagctaactctcctcgccgcagccgaacgaccgagcgcagcgagtcagtgagcgaggaagcgtctagtgtcgctgcaaccatagtttgacataatgcaaccataccttgacataattaaagtcatactctgacataaagcgataacttcgtataaggtatactatacgaagttattctgcacgctgcgtcttctctgctacacatgaactcgcaagggtcgtgaagtcggttccttcaatggt

SEQ ID NO: 2771 - DNA, 250 bp, synthetic construct
  source 1..250: mol_type = other DNA
gtatgtgcagctaactctcctcgccgcagccgaacgaccgagcgcagcgagtcagtgagcgaggaagcgtctagtgtcgctgcaaccatagtttgacataatgcaaccataccttgacataattaaagtcatactctgacataaagcgataacttcgtataaagtatcctatacgaagttattccaagccgtgcgtcttctctgctacacatgaactcgcaagggtcgtgaagtcggttccttcaatggt

SEQ ID NO: 2772 - DNA, 250 bp, synthetic construct
  source 1..250: mol_type = other DNA
gtatgtgcagctaactctcctcgccgcagccgaacgaccgagcgcagcgagtcagtgagcgaggaagcgtctagtgtcgctgcaaccatagtttgacataatgcaaccataccttgacataattaaagtcatactctgacataaagcgataacttcgtataatgtatactatacgaagttattccaatagtagcgtcttctctgctacacatgaactcgcaagggtcgtgaagtcggttccttcaatggt

SEQ ID NO: 2773 - DNA, 250 bp, synthetic construct
  source 1..250: mol_type = other DNA
gtatgtgcagctaactctcctcgccgcagccgaacgaccgagcgcagcgagtcagtgagcgaggaagcgtctagtgtcgctgcaaccatagtttgacataatgcaaccataccttgacataattaaagtcatactctgacataaagcgtaccgttcgtataatgtatgctataccaagttattcaccccgggtcgtcttctctgctacacatgaactcgcaagggtcgtgaagtcggttccttcaatggt

SEQ ID NO: 2774 - DNA, 250 bp, synthetic construct
  source 1..250: mol_type = other DNA
gtatgtgcagctaactctcctcgccgcagccgaacgaccgagcgcagcgagtcagtgagcgaggaagcgtctagtgtcgctgcaaccatagtttgacataatgcaaccataccttgacataattaaagtcatactctgacataaagcgataacttcgtataatgtatcgtatacgaacggtatcgcaagtatgagtcttctctgctacacatgaactcgcaagggtcgtgaagtcggttccttcaatggt

SEQ ID NO: 2775 - DNA, 250 bp, synthetic construct
  source 1..250: mol_type = other DNA
gtatgtgcagctaactctcctcgccgcagccgaacgaccgagcgcagcgagtcagtgagcgaggaagcgtctagtgtcgctgcaaccatagtttgacataatgcaaccataccttgacataattaaagtcatactctgacataaagcgatagtactgcgcgcctgaattcatcgttaaatcgtcttattctgctgtcttctctgctacacatgaactcgcaagggtcgtgaagtcggttccttcaatggt

SEQ ID NO: 2776 - DNA, 250 bp, synthetic construct
  source 1..250: mol_type = other DNA
gtatgtgcagctaactctcctcgccgcagccgaacgaccgagcgcagcgagtcagtgagcgaggaagcgtctagtgtcgctgcaaccatagtttgacataatgcaaccataccttgacataattaaagtcatactctgacataaagcgatcgttttaaggatgacttcagtcgcgccgtacttcgattccctctgtcttctctgctacacatgaactcgcaagggtcgtgaagtcggttccttcaatggt

SEQ ID NO: 2777 - DNA, 250 bp, synthetic construct
  source 1..250: mol_type = other DNA
gtatgtgcagctaactctcctcgccgcagccgaacgaccgagcgcagcgagtcagtgagcgaggaagcgtctagtgtcgctgcaaccatagtttgacataatgcaaccataccttgacataattaaagtcatactctgacataaagcgatcaggaattgtgagcggataacaatttagtcagactcgcccattggtcttctctgctacacatgaactcgcaagggtcgtgaagtcggttccttcaatggt

SEQ ID NO: 2778 - DNA, 250 bp, synthetic construct
  source 1..250: mol_type = other DNA
gtatgtgcagctaactctcctcgccgcagccgaacgaccgagcgcagcgagtcagtgagcgaggaagcgtctagtgtcgctgcaaccatagtttgacataatgcaaccataccttgacataattaaagtcatactctgacataaagcgatcatagtcagctgaagcgagacaccgaccaacattcgagcggagggtcttctctgctacacatgaactcgcaagggtcgtgaagtcggttccttcaatggt

SEQ ID NO: 2779 - DNA, 250 bp, synthetic construct
  source 1..250: mol_type = other DNA
gtatgtgcagctaactctcctcgccgcagccgaacgaccgagcgcagcgagtcagtgagcgaggaagcgtctagtgtcgctgcaaccatagtttgacataatgcaaccataccttgacataattaaagtcatactctgacataaagcgatcataaatatataaattaattattaaattagtcagcgccctttacgtcttctctgctacacatgaactcgcaagggtcgtgaagtcggttccttcaatggt

SEQ ID NO: 2780 - DNA, 250 bp, synthetic construct
  source 1..250: mol_type = other DNA
gtatgtgcagctaactctcctcgccgcagccgaacgaccgagcgcagcgagtcagtgagcgaggaagcgtctagtgtcgctgcaaccatagtttgacataatgcaaccataccttgacataattaaagtcatactctgacataaagcgatcatttacttttggttacatatttagtcagaccaagttagatggcgtcttctctgctacacatgaactcgcaagggtcgtgaagtcggttccttcaatggt

SEQ ID NO: 2781 - DNA, 250 bp, synthetic construct
  source 1..250: mol_type = other DNA
gtatgtgcagctaactctcctcgccgcagccgaacgaccgagcgcagcgagtcagtgagcgaggaagcgtctagtgtcgctgcaaccatagtttgacataatgcaaccataccttgacataattaaagtcatactctgacataaagcgatcatagtctgtgattgttatcacatttcagaccaacactcgcttagtcttctctgctacacatgaactcgcaagggtcgtgaagtcggttccttcaatggt

SEQ ID NO: 2782 - DNA, 250 bp, synthetic construct
  source 1..250: mol_type = other DNA
gtatgtgcagctaactctcctcgccgcagccgaacgaccgagcgcagcgagtcagtgagcgaggaagcgtctagtgtcgctgcaaccatagtttgacataatgcaaccataccttgacataattaaagtcatactctgacataaagcgatcatagtcagatgaatttttatgcaaagaccaacacgcctttcatgtcttctctgctacacatgaactcgcaagggtcgtgaagtcggttccttcaatggt

SEQ ID NO: 2783 - DNA, 250 bp, synthetic construct
  source 1..250: mol_type = other DNA
gtatgtgcagctaactctcctcgccgcagccgaacgaccgagcgcagcgagtcagtgagcgaggaagcgtctagtgtcgctgcaaccatagtttgacataatgcaaccataccttgacataattaaagtcatactctgacataaagcgatcatagtcaactgtatataaatacagttcagaccagttccagcgcgtcttctctgctacacatgaactcgcaagggtcgtgaagtcggttccttcaatggt

SEQ ID NO: 2784 - DNA, 250 bp, synthetic construct
  source 1..250: mol_type = other DNA
gtatgtgcagctaactctcctcgccgcagccgaacgaccgagcgcagcgagtcagtgagcgaggaagcgtctagtgtcgctgcaaccatagtttgacataatgcaaccataccttgacataattaaagtcatactctgacataaagcgatcatagcgtactagttaactagttcgagtcagaccgcatcccatggtcttctctgctacacatgaactcgcaagggtcgtgaagtcggttccttcaatggt

SEQ ID NO: 2785 - DNA, 250 bp, synthetic construct
  source 1..250: mol_type = other DNA
gtatgtgcagctaactctcctcgccgcagccgaacgaccgagcgcagcgagtcagtgagcgaggaagcgtctagtgtcgctgcaaccatagtttgacataatgcaaccataccttgacataattaaagtcatactctgacataaagcgatcataattgttatccgctcacaattccagtcagactggttggggcgtcttctctgctacacatgaactcgcaagggtcgtgaagtcggttccttcaatggt

SEQ ID NO: 2786 - DNA, 250 bp, synthetic construct
  source 1..250: mol_type = other DNA
gtatgtgcagctaactctcctcgccgcagccgaacgaccgagcgcagcgagtcagtgagcgaggaagcgtctagtgtcgctgcaaccatagtttgacataatgcaaccataccttgacataattaaagtcatactctgacataaagcgatcatggtgtctcgcttcagcagtcagaccaacattacgacacaaggtcttctctgctacacatgaactcgcaagggtcgtgaagtcggttccttcaatggt

SEQ ID NO: 2787 - DNA, 250 bp, synthetic construct
  source 1..250: mol_type = other DNA
gtatgtgcagctaactctcctcgccgcagccgaacgaccgagcgcagcgagtcagtgagcgaggaagcgtctagtgtcgctgcaaccatagtttgacataatgcaaccataccttgacataattaaagtcatactctgacataaagcgatcatatttaataattaatttatatatttaagtcagcctcgcccctgtcttctctgctacacatgaactcgcaagggtcgtgaagtcggttccttcaatggt

SEQ ID NO: 2788 - DNA, 250 bp, synthetic construct
  source 1..250: mol_type = other DNA
gtatgtgcagctaactctcctcgccgcagccgaacgaccgagcgcagcgagtcagtgagcgaggaagcgtctagtgtcgctgcaaccatagtttgacataatgcaaccataccttgacataattaaagtcatactctgacataaagcgatcaatatgtaaccaaaagtaaaatagtcagaccaaaggctccatagtcttctctgctacacatgaactcgcaagggtcgtgaagtcggttccttcaatggt

SEQ ID NO: 2789 - DNA, 250 bp, synthetic construct
  source 1..250: mol_type = other DNA
gtatgtgcagctaactctcctcgccgcagccgaacgaccgagcgcagcgagtcagtgagcgaggaagcgtctagtgtcgctgcaaccatagtttgacataatgcaaccataccttgacataattaaagtcatactctgacataaagcgatcatagtcaatgtgataacaatcacagaagaccaagtttcacttagtcttctctgctacacatgaactcgcaagggtcgtgaagtcggttccttcaatggt

SEQ ID NO: 2790 - DNA, 250 bp, synthetic construct
  source 1..250: mol_type = other DNA
gtatgtgcagctaactctcctcgccgcagccgaacgaccgagcgcagcgagtcagtgagcgaggaagcgtctagtgtcgctgcaaccatagtttgacataatgcaaccataccttgacataattaaagtcatactctgacataaagcgatcatttgcataaaaattcatctagtcagaccaacagcagcgtgtcgtcttctctgctacacatgaactcgcaagggtcgtgaagtcggttccttcaatggt

SEQ ID NO: 2791 - DNA, 250 bp, synthetic construct
  source 1..250: mol_type = other DNA
gtatgtgcagctaactctcctcgccgcagccgaacgaccgagcgcagcgagtcagtgagcgaggaagcgtctagtgtcgctgcaaccatagtttgacataatgcaaccataccttgacataattaaagtcatactctgacataaagcgatcatagtcaaactgtatttatatacagttggaccaggggaagactgtcttctctgctacacatgaactcgcaagggtcgtgaagtcggttccttcaatggt

SEQ ID NO: 2792 - DNA, 250 bp, synthetic construct
  source 1..250: mol_type = other DNA
gtatgtgcagctaactctcctcgccgcagccgaacgaccgagcgcagcgagtcagtgagcgaggaagcgtctagtgtcgctgcaaccatagtttgacataatgcaaccataccttgacataattaaagtcatactctgacataaagcgatcatagtcgaactagttaactagtacgctcagacctccagccgatgtcttctctgctacacatgaactcgcaagggtcgtgaagtcggttccttcaatggt

SEQ ID NO: 2793 - DNA, 250 bp, synthetic construct
  source 1..250: mol_type = other DNA
gtatgtgcagctaactctcctcgccgcagccgaacgaccgagcgcagcgagtcagtgagcgaggaagcgtctagtgtcgctgcaaccatagtttgacataatgcaaccataccttgacataattaaagtcatactctgacataaagcgacttaaacaaaatatatcttgcccgccttacaaatacggggccgtggtcttctctgctacacatgaactcgcaagggtcgtgaagtcggttccttcaatggt

SEQ ID NO: 2794 - DNA, 250 bp, synthetic construct
  source 1..250: mol_type = other DNA
gtatgtgcagctaactctcctcgccgcagccgaacgaccgagcgcagcgagtcagtgagcgaggaagcgtctagtgtcgctgcaaccatagtttgacataatgcaaccataccttgacataattaaagtcatactctgacataaagcacatgaattcaaagttatgtaatatagtactatgtacggacaccgtggtcttctctgctacacatgaactcgcaagggtcgtgaagtcggttccttcaatggt

SEQ ID NO: 2795 - DNA, 250 bp, synthetic construct
  source 1..250: mol_type = other DNA
gtatgtgcagctaactctcctcgccgcagccgaacgaccgagcgcagcgagtcagtgagcgaggaagcgtctagtgtcgctgcaaccatagtttgacataatgcaaccataccttgacataattaaagtcatactctgacataaagctaacacccgtattacttcataatcgtttgtaattcaatatgggcctagtcttctctgctacacatgaactcgcaagggtcgtgaagtcggttccttcaatggt

SEQ ID NO: 2796 - DNA, 250 bp, synthetic construct
  source 1..250: mol_type = other DNA
gtatgtgcagctaactctcctcgccgcagccgaacgaccgagcgcagcgagtcagtgagcgaggaagcgtctagtgtcgctgcaaccatagtttgacataatgcaaccataccttgacataattaaagtcatactctgacataaagcatgtacactgatgagttattacacctcaagttcaatggtgtcgtttggtcttctctgctacacatgaactcgcaagggtcgtgaagtcggttccttcaatggt

SEQ ID NO: 2797 - DNA, 250 bp, synthetic construct
  source 1..250: mol_type = other DNA
gtatgtgcagctaactctcctcgccgcagccgaacgaccgagcgcagcgagtcagtgagcgaggaagcgtctagtgtcgctgcaaccatagtttgacataatgcaaccataccttgacataattaaagtcatactctgacataaagcagcttgatctacattggattgccattctctcacagtacgagggttgagtcttctctgctacacatgaactcgcaagggtcgtgaagtcggttccttcaatggt

SEQ ID NO: 2798 - DNA, 250 bp, synthetic construct
  source 1..250: mol_type = other DNA
gtatgtgcagctaactctcctcgccgcagccgaacgaccgagcgcagcgagtcagtgagcgaggaagcgtctagtgtcgctgcaaccatagtttgacataatgcaaccataccttgacataattaaagtcatactctgacataaagcttatgcaggacgacgtacgcgttccatataaacctgttcgtatgaccgtcttctctgctacacatgaactcgcaagggtcgtgaagtcggttccttcaatggt

SEQ ID NO: 2799 - DNA, 250 bp, synthetic construct
  source 1..250: mol_type = other DNA
gtatgtgcagctaactctcctcgccgcagccgaacgaccgagcgcagcgagtcagtgagcgaggaagcgtctagtgtcgctgcaaccatagtttgacataatgcaaccataccttgacataattaaagtcatactctgacataaagctctttgctcacgcatctagtcggtccacgtttggttctatgcgggtcgtcttctctgctacacatgaactcgcaagggtcgtgaagtcggttccttcaatggt

SEQ ID NO: 2800 - DNA, 250 bp, synthetic construct
  source 1..250: mol_type = other DNA
gtatgtgcagctaactctcctcgccgcagccgaacgaccgagcgcagcgagtcagtgagcgaggaagcgtctagtgtcgctgcaaccatagtttgacataatgcaaccataccttgacataattaaagtcatactctgacataaagcgtacgatccagtgatctccaagacgctgcaagagtcccgcgggtaaagtcttctctgctacacatgaactcgcaagggtcgtgaagtcggttccttcaatggt

SEQ ID NO: 2801 - DNA, 250 bp, synthetic construct
  source 1..250: mol_type = other DNA
gtatgtgcagctaactctcctcgccgcagccgaacgaccgagcgcagcgagtcagtgagcgaggaagcgtctagtgtcgctgcaaccatagtttgacataatgcaaccataccttgacataattaaagtcatactctgacataaagccagaccacatagctgccatgtcctgatcggacggacccgaccgcgtggtcttctctgctacacatgaactcgcaagggtcgtgaagtcggttccttcaatggt

SEQ ID NO: 2802 - DNA, 250 bp, synthetic construct
  source 1..250: mol_type = other DNA
gtatgtgcagctaactctcctcgccgcagccgaacgaccgagcgcagcgagtcagtgagcgaggaagcgtctagtgtcgctgcaaccatagtttgacataatgcaaccataccttgacataattaaagtcatactctgacataaagcccgacccggaagagggcgcctagaattgggagtggtctggcatgctcgtcttctctgctacacatgaactcgcaagggtcgtgaagtcggttccttcaatggt

SEQ ID NO: 2803 - DNA, 250 bp, synthetic construct
  source 1..250: mol_type = other DNA
gtatgtgcagctaactctcctcgccgcagccgaacgaccgagcgcagcgagtcagtgagcgaggaagcgtctagtgtcgctgcaaccatagtttgacataatgcaaccataccttgacataattaaagtcatactctgacataaagcgttggcgcccggccctcaggccctgcagtgagttccagcctccgctggtcttctctgctacacatgaactcgcaagggtcgtgaagtcggttccttcaatggt

SEQ ID NO: 2804 - DNA, 250 bp, synthetic construct
  source 1..250: mol_type = other DNA
gtatgtgcagctaactctcctcgccgcagccgaacgaccgagcgcagcgagtcagtgagcgaggaagcgtctagtgtcgctgcaaccatagtttgacataatgcaaccataccttgacataattaaagtcatactctgacataaagcggcgctctgtaccccgctcggtcctcccgcgcatcgcggtagatactgtcttctctgctacacatgaactcgcaagggtcgtgaagtcggttccttcaatggt

SEQ ID NO: 2805 - DNA, 250 bp, synthetic construct
  source 1..250: mol_type = other DNA
gtatgtgcagctaactctcctcgccgcagccgaacgaccgagcgcagcgagtcagtgagcgaggaagcgtctagtgtcgctgcaaccatagtttgacataatgcaaccataccttgacataattaaagtcatactctgacataaagccgcgagaggccggcagccgtctggcgtcgggtggcggcccatacgtggtcttctctgctacacatgaactcgcaagggtcgtgaagtcggttccttcaatggt

SEQ ID NO: 2806 - DNA, 250 bp, synthetic construct
  source 1..250: mol_type = other DNA
gtatgtgcagctaactctcctcgccgcagccgaacgaccgagcgcagcgagtcagtgagcgaggaagcgtctagtgtcgctgcaaccatagtttgacataatgcaaccataccttgacataattaaagtcatactctgacataaagcatattcgcgaaaatttcaataacttacaaaaaacctaacccatcgacgtcttctctgctacacatgaactcgcaagggtcgtgaagtcggttccttcaatggt

SEQ ID NO: 2807 - DNA, 250 bp, synthetic construct
  source 1..250: mol_type = other DNA
gtatgtgcagctaactctcctcgccgcagccgaacgaccgagcgcagcgagtcagtgagcgaggaagcgtctagtgtcgctgcaaccatagtttgacataatgcaaccataccttgacataattaaagtcatactctgacataaagccaatattcgcgaaaattaataacttacaaaaaacctatacggtaacagtcttctctgctacacatgaactcgcaagggtcgtgaagtcggttccttcaatggt

SEQ ID NO: 2808 - DNA, 250 bp, synthetic construct
  source 1..250: mol_type = other DNA
gtatgtgcagctaactctcctcgccgcagccgaacgaccgagcgcagcgagtcagtgagcgaggaagcgtctagtgtcgctgcaaccatagtttgacataatgcaaccataccttgacataattaaagtcatactctgacataaagccactatattcgcgaaaatttaacttacaaaaaacctattccccagcagtcttctctgctacacatgaactcgcaagggtcgtgaagtcggttccttcaatggt

SEQ ID NO: 2809 - DNA, 250 bp, synthetic construct
  source 1..250: mol_type = other DNA
gtatgtgcagctaactctcctcgccgcagccgaacgaccgagcgcagcgagtcagtgagcgaggaagcgtctagtgtcgctgcaaccatagtttgacataatgcaaccataccttgacataattaaagtcatactctgacataaagccactggatattcgcgaaaattacttacaaaaaacctaagtccgtcttgtcttctctgctacacatgaactcgcaagggtcgtgaagtcggttccttcaatggt

SEQ ID NO: 2810 - DNA, 250 bp, synthetic construct
  source 1..250: mol_type = other DNA
gtatgtgcagctaactctcctcgccgcagccgaacgaccgagcgcagcgagtcagtgagcgaggaagcgtctagtgtcgctgcaaccatagtttgacataatgcaaccataccttgacataattaaagtcatactctgacataaagccactggatatattcgcgaaaattttacaaaaaacctatgagcctcgagtcttctctgctacacatgaactcgcaagggtcgtgaagtcggttccttcaatggt

SEQ ID NO: 2811 - DNA, 250 bp, synthetic construct
  source 1..250: mol_type = other DNA
gtatgtgcagctaactctcctcgccgcagccgaacgaccgagcgcagcgagtcagtgagcgaggaagcgtctagtgtcgctgcaaccatagtttgacataatgcaaccataccttgacataattaaagtcatactctgacataaagccactggatagatattcgcgaaaattacaaaaaacctataataccgatgtcttctctgctacacatgaactcgcaagggtcgtgaagtcggttccttcaatggt

SEQ ID NO: 2812 - DNA, 250 bp, synthetic construct
  source 1..250: mol_type = other DNA
gtatgtgcagctaactctcctcgccgcagccgaacgaccgagcgcagcgagtcagtgagcgaggaagcgtctagtgtcgctgcaaccatagtttgacataatgcaaccataccttgacataattaaagtcatactctgacataaagccactggataggcatattcgcgaaaattaaaaaacctagccaagaattgtcttctctgctacacatgaactcgcaagggtcgtgaagtcggttccttcaatggt

SEQ ID NO: 2813 - DNA, 250 bp, synthetic construct
  source 1..250: mol_type = other DNA
gtatgtgcagctaactctcctcgccgcagccgaacgaccgagcgcagcgagtcagtgagcgaggaagcgtctagtgtcgctgcaaccatagtttgacataatgcaaccataccttgacataattaaagtcatactctgacataaagccactggataggcatatattcgcgaaaattaaaacctaattgagatcggtcttctctgctacacatgaactcgcaagggtcgtgaagtcggttccttcaatggt

SEQ ID NO: 2814 - DNA, 250 bp, synthetic construct
  source 1..250: mol_type = other DNA
gtatgtgcagctaactctcctcgccgcagccgaacgaccgagcgcagcgagtcagtgagcgaggaagcgtctagtgtcgctgcaaccatagtttgacataatgcaaccataccttgacataattaaagtcatactctgacataaagccactggataggcatatatattcgcgaaaattaacctaggtgcaacatgtcttctctgctacacatgaactcgcaagggtcgtgaagtcggttccttcaatggt

SEQ ID NO: 2815 - DNA, 250 bp, synthetic construct
  source 1..250: mol_type = other DNA
gtatgtgcagctaactctcctcgccgcagccgaacgaccgagcgcagcgagtcagtgagcgaggaagcgtctagtgtcgctgcaaccatagtttgacataatgcaaccataccttgacataattaaagtcatactctgacataaagccactggataggcatatcaatattcgcgaaaattcctattcgaccactgtcttctctgctacacatgaactcgcaagggtcgtgaagtcggttccttcaatggt

SEQ ID NO: 2816 - DNA, 250 bp, synthetic construct
  source 1..250: mol_type = other DNA
gtatgtgcagctaactctcctcgccgcagccgaacgaccgagcgcagcgagtcagtgagcgaggaagcgtctagtgtcgctgcaaccatagtttgacataatgcaaccataccttgacataattaaagtcatactctgacataaagccactggataggcatatcaatatattcgcgaaaatttacctcccgacagtcttctctgctacacatgaactcgcaagggtcgtgaagtcggttccttcaatggt

SEQ ID NO: 2817 - DNA, 250 bp, synthetic construct
  source 1..250: mol_type = other DNA
gtatgtgcagctaactctcctcgccgcagccgaacgaccgagcgcagcgagtcagtgagcgaggaagcgtctagtgtcgctgcaaccatagtttgacataatgcaaccataccttgacataattaaagtcatactctgacataaagcaattttcgcgaatattcaataacttacaaaaaacctaaagtctgcccgtcttctctgctacacatgaactcgcaagggtcgtgaagtcggttccttcaatggt

SEQ ID NO: 2818 - DNA, 250 bp, synthetic construct
  source 1..250: mol_type = other DNA
gtatgtgcagctaactctcctcgccgcagccgaacgaccgagcgcagcgagtcagtgagcgaggaagcgtctagtgtcgctgcaaccatagtttgacataatgcaaccataccttgacataattaaagtcatactctgacataaagccaaattttcgcgaatataataacttacaaaaaacctaatcctatgcagtcttctctgctacacatgaactcgcaagggtcgtgaagtcggttccttcaatggt

SEQ ID NO: 2819 - DNA, 250 bp, synthetic construct
  source 1..250: mol_type = other DNA
gtatgtgcagctaactctcctcgccgcagccgaacgaccgagcgcagcgagtcagtgagcgaggaagcgtctagtgtcgctgcaaccatagtttgacataatgcaaccataccttgacataattaaagtcatactctgacataaagccactaattttcgcgaatattaacttacaaaaaacctatctgccctacgtcttctctgctacacatgaactcgcaagggtcgtgaagtcggttccttcaatggt

SEQ ID NO: 2820 - DNA, 250 bp, synthetic construct
  source 1..250: mol_type = other DNA
gtatgtgcagctaactctcctcgccgcagccgaacgaccgagcgcagcgagtcagtgagcgaggaagcgtctagtgtcgctgcaaccatagtttgacataatgcaaccataccttgacataattaaagtcatactctgacataaagccactggaattttcgcgaatatacttacaaaaaacctagccagttactgtcttctctgctacacatgaactcgcaagggtcgtgaagtcggttccttcaatggt

SEQ ID NO: 2821 - DNA, 250 bp, synthetic construct
  source 1..250: mol_type = other DNA
gtatgtgcagctaactctcctcgccgcagccgaacgaccgagcgcagcgagtcagtgagcgaggaagcgtctagtgtcgctgcaaccatagtttgacataatgcaaccataccttgacataattaaagtcatactctgacataaagccactggataattttcgcgaatatttacaaaaaacctattggaagaacgtcttctctgctacacatgaactcgcaagggtcgtgaagtcggttccttcaatggt

SEQ ID NO: 2822 - DNA, 250 bp, synthetic construct
  source 1..250: mol_type = other DNA
gtatgtgcagctaactctcctcgccgcagccgaacgaccgagcgcagcgagtcagtgagcgaggaagcgtctagtgtcgctgcaaccatagtttgacataatgcaaccataccttgacataattaaagtcatactctgacataaagccactggatagaattttcgcgaatatacaaaaaacctaattcaggggtgtcttctctgctacacatgaactcgcaagggtcgtgaagtcggttccttcaatggt

SEQ ID NO: 2823 - DNA, 250 bp, synthetic construct
  source 1..250: mol_type = other DNA
gtatgtgcagctaactctcctcgccgcagccgaacgaccgagcgcagcgagtcagtgagcgaggaagcgtctagtgtcgctgcaaccatagtttgacataatgcaaccataccttgacataattaaagtcatactctgacataaagccactggataggcaattttcgcgaatataaaaaacctacacatagtacgtcttctctgctacacatgaactcgcaagggtcgtgaagtcggttccttcaatggt

SEQ ID NO: 2824 - DNA, 250 bp, synthetic construct
  source 1..250: mol_type = other DNA
gtatgtgcagctaactctcctcgccgcagccgaacgaccgagcgcagcgagtcagtgagcgaggaagcgtctagtgtcgctgcaaccatagtttgacataatgcaaccataccttgacataattaaagtcatactctgacataaagccactggataggcataattttcgcgaatataaaacctacacggacccggtcttctctgctacacatgaactcgcaagggtcgtgaagtcggttccttcaatggt

SEQ ID NO: 2825 - DNA, 250 bp, synthetic construct
  source 1..250: mol_type = other DNA
gtatgtgcagctaactctcctcgccgcagccgaacgaccgagcgcagcgagtcagtgagcgaggaagcgtctagtgtcgctgcaaccatagtttgacataatgcaaccataccttgacataattaaagtcatactctgacataaagccactggataggcatataattttcgcgaatataacctaggtgcgtatagtcttctctgctacacatgaactcgcaagggtcgtgaagtcggttccttcaatggt

SEQ ID NO: 2826 - DNA, 250 bp, synthetic construct
  source 1..250: mol_type = other DNA
gtatgtgcagctaactctcctcgccgcagccgaacgaccgagcgcagcgagtcagtgagcgaggaagcgtctagtgtcgctgcaaccatagtttgacataatgcaaccataccttgacataattaaagtcatactctgacataaagccactggataggcatatcaaattttcgcgaatatcctaacctcgactcgtcttctctgctacacatgaactcgcaagggtcgtgaagtcggttccttcaatggt

SEQ ID NO: 2827 - DNA, 250 bp, synthetic construct
  source 1..250: mol_type = other DNA
gtatgtgcagctaactctcctcgccgcagccgaacgaccgagcgcagcgagtcagtgagcgaggaagcgtctagtgtcgctgcaaccatagtttgacataatgcaaccataccttgacataattaaagtcatactctgacataaagccactggataggcatatcaataattttcgcgaatattagaacggtttagtcttctctgctacacatgaactcgcaagggtcgtgaagtcggttccttcaatggt

SEQ ID NO: 2828 - DNA, 250 bp, synthetic construct
  source 1..250: mol_type = other DNA
gtatgtgcagctaactctcctcgccgcagccgaacgaccgagcgcagcgagtcagtgagcgaggaagcgtctagtgtcgctgcaaccatagtttgacataatgcaaccataccttgacataattaaagtcatactctgacataaagcaattttcgcgaatattcaataattttcgcgaatattacaacactaaagtcttctctgctacacatgaactcgcaagggtcgtgaagtcggttccttcaatggt

SEQ ID NO: 2829 - DNA, 250 bp, synthetic construct
  source 1..250: mol_type = other DNA
gtatgtgcagctaactctcctcgccgcagccgaacgaccgagcgcagcgagtcagtgagcgaggaagcgtctagtgtcgctgcaaccatagtttgacataatgcaaccataccttgacataattaaagtcatactctgacataaagccaattttcgcgaatatcaaaattttcgcgaatatctataagctcggcgtcttctctgctacacatgaactcgcaagggtcgtgaagtcggttccttcaatggt

SEQ ID NO: 2830 - DNA, 250 bp, synthetic construct
  source 1..250: mol_type = other DNA
gtatgtgcagctaactctcctcgccgcagccgaacgaccgagcgcagcgagtcagtgagcgaggaagcgtctagtgtcgctgcaaccatagtttgacataatgcaaccataccttgacataattaaagtcatactctgacataaagccaaattttcgcgaatataaattttcgcgaatatcctaagggccgatagtcttctctgctacacatgaactcgcaagggtcgtgaagtcggttccttcaatggt

SEQ ID NO: 2831 - DNA, 250 bp, synthetic construct
  source 1..250: mol_type = other DNA
gtatgtgcagctaactctcctcgccgcagccgaacgaccgagcgcagcgagtcagtgagcgaggaagcgtctagtgtcgctgcaaccatagtttgacataatgcaaccataccttgacataattaaagtcatactctgacataaagcaattttcgcgaatattcaataattttcgcgaatattattagttggatgtcttctctgctacacatgaactcgcaagggtcgtgaagtcggttccttcaatggt

SEQ ID NO: 2832 - DNA, 250 bp, synthetic construct
  source 1..250: mol_type = other DNA
gtatgtgcagctaactctcctcgccgcagccgaacgaccgagcgcagcgagtcagtgagcgaggaagcgtctagtgtcgctgcaaccatagtttgacataatgcaaccataccttgacataattaaagtcatactctgacataaagccaattttcgcgaatatcaaaattttcgcgaatatctactaccgatctgtcttctctgctacacatgaactcgcaagggtcgtgaagtcggttccttcaatggt

SEQ ID NO: 2833 - DNA, 250 bp, synthetic construct
  source 1..250: mol_type = other DNA
gtatgtgcagctaactctcctcgccgcagccgaacgaccgagcgcagcgagtcagtgagcgaggaagcgtctagtgtcgctgcaaccatagtttgacataatgcaaccataccttgacataattaaagtcatactctgacataaagccaaattttcgcgaatataaattttcgcgaatatcctactgtatctaagtcttctctgctacacatgaactcgcaagggtcgtgaagtcggttccttcaatggt

SEQ ID NO: 2834 - DNA, 250 bp, synthetic construct
  source 1..250: mol_type = other DNA
gtatgtgcagctaactctcctcgccgcagccgaacgaccgagcgcagcgagtcagtgagcgaggaagcgtctagtgtcgcttgcaccataagcctgcataatgcaaccataccttgacataattaaagtcatactctgacataaagccccttattaaaaatgatgctaaaaataaattccattaaactccgggtgtcttctctgctacacatgaactcgcaagggtcgtgaagtcggttccttcaatggt

SEQ ID NO: 2835 - DNA, 250 bp, synthetic construct
  source 1..250: mol_type = other DNA
gtatgtgcagctaactctcctcgccgcagccgaacgaccgagcgcagcgagtcagtgagcgaggaagcgtctagtgtcgctgcaaccatagtttgacataacttccttgataccctgcataattaaagtcatactctgacataaagccccttattaaaaatgatgctaaaaataaattccattatctccggattgtcttctctgctacacatgaactcgcaagggtcgtgaagtcggttccttcaatggt

SEQ ID NO: 2836 - DNA, 250 bp, synthetic construct
  source 1..250: mol_type = other DNA
gtatgtgcagctaactctcctcgccgcagccgaacgaccgagcgcagcgagtcagtgagcgaggaagcgtctagtgtcgctgcaaccatagtttgacataatgcaaccataccttgacataattggtacaataagcgtgcataaagccccttattaaaaatgatgctaaaaataaattccattagtgcgtgtctgtcttctctgctacacatgaactcgcaagggtcgtgaagtcggttccttcaatggt

SEQ ID NO: 2837 - DNA, 250 bp, synthetic construct
  source 1..250: mol_type = other DNA
gtatgtgcagctaactctcctcgccgcagccgaacgaccgagcgcagcgagtcagtgagcgaggaagcgtctagtgtcgcttgcaccataagcctgcataacttccttgataccctgcataatggtacaataagcgtgcataaaagccccttattaaaaatgatgctaaaaataaattccattagggtccgatggtcttctctgctacacatgaactcgcaagggtcgtgaagtcggttccttcaatggt

SEQ ID NO: 2838 - DNA, 250 bp, synthetic construct
  source 1..250: mol_type = other DNA
gtatgtgcagctaactctcctcgccgcagccgaacgaccgagcgcagcgagtcagtgagcgaggaagcgtctagtgtcgcttgcaccataagcctgcatatcttccttgataccctgcataattggtacaataagcgtgcataaagccccttattaaaaatgatgctaaaaataaattccattaagtcaccagagtcttctctgctacacatgaactcgcaagggtcgtgaagtcggttccttcaatggt

SEQ ID NO: 2839 - DNA, 250 bp, synthetic construct
  source 1..250: mol_type = other DNA
gtatgtgcagctaactctcctcgccgcagccgaacgaccgagcgcagcgagtcagtgagcgaggaagcgtctagtgtcgcttgcaccataagcctgcatatcttccttgataccctgcataattggtacaataagcgtgcataagctatttttgttgtagtttaacaacaaacaggctggtctattgtagtgccgtcttctctgctacacatgaactcgcaagggtcgtgaagtcggttccttcaatggt

SEQ ID NO: 2840 - DNA, 250 bp, synthetic construct
  source 1..250: mol_type = other DNA
gtatgtgcagctaactctcctcgccgcagccgaacgaccgagcgcagcgagtcagtgagcgaggaagcgtctagtgtcgctgaaagcatacattgacataatgcaaccataccttgacataattaaagtcatactctgacataaagccaaattttcgcgaatataaattttcgcgaatatcctactgtgtgcatgtcttctctgctacacatgaactcgcaagggtcgtgaagtcggttccttcaatggt

SEQ ID NO: 2841 - DNA, 250 bp, synthetic construct
  source 1..250: mol_type = other DNA
gtatgtgcagctaactctcctcgccgcagccgaacgaccgagcgcagcgagtcagtgagcgaggaagcgtctagtgtcgctgcaaccatagtttgacataagacaaccatagtctgacaaaattaaagtcatactctgacataaagccaaattttcgcgaatataaattttcgcgaatatcctagcctgtcctcgtcttctctgctacacatgaactcgcaagggtcgtgaagtcggttccttcaatggt

SEQ ID NO: 2842 - DNA, 250 bp, synthetic construct
  source 1..250: mol_type = other DNA
gtatgtgcagctaactctcctcgccgcagccgaacgaccgagcgcagcgagtcagtgagcgaggaagcgtctagtgtcgctgcaaccatagtttgacataatgcaaccataccttgacataattaaagcatagtttgacataaaagccaaattttcgcgaatataaattttcgcgaatatcctacttacgccctgtcttctctgctacacatgaactcgcaagggtcgtgaagtcggttccttcaatggt

SEQ ID NO: 2843 - DNA, 250 bp, synthetic construct
  source 1..250: mol_type = other DNA
gtatgtgcagctaactctcctcgccgcagccgaacgaccgagcgcagcgagtcagtgagcgaggaagcgtctagtgtcgctgaaagcatacattgacataagacaaccatagtctgacaaaattaaagcatagtttgacataaaagccaaattttcgcgaatataaattttcgcgaatatcctacatctatgcagtcttctctgctacacatgaactcgcaagggtcgtgaagtcggttccttcaatggt

SEQ ID NO: 2844 - DNA, 250 bp, synthetic construct
  source 1..250: mol_type = other DNA
gtatgtgcagctaactctcctcgccgcagccgaacgaccgagcgcagcgagtcagtgagcgaggaagcgtctagtgtcgctgaaagcatacattgacataagacaaccatagtctgacaaatttaaagcatagtttgacataaaatacaaattttcgcgaatataaattttcgcgaatatcctagtccaagccggtcttctctgctacacatgaactcgcaagggtcgtgaagtcggttccttcaatggt

SEQ ID NO: 2845 - DNA, 250 bp, synthetic construct
  source 1..250: mol_type = other DNA
gtatgtgcagctaactctcctcgccgcagccgaacgaccgagcgcagcgagtcagtgagcgaggaagcgtctagtgtcgctgaaagcatacattgacataagacaaccatagtctgacaaatttaaagcatagtttgacataaaatagcatttttgtattttagctacataatttaatattattggtaagcggcgtcttctctgctacacatgaactcgcaagggtcgtgaagtcggttccttcaatggt

SEQ ID NO: 2846 - DNA, 250 bp, synthetic construct
  source 1..250: mol_type = other DNA
gtatgtgcagctaactctcctcgccgcagccgaacgaccgagcgcagcgagtcagtgagcgaggaagcgtctagtgtcgctgcaaccatagtttgacataatgcaaccataccttgacataattaaagcatagtttgacataaaagccccttattaaaaatgatgctaaaaataaattccattaaatgggtatagtcttctctgctacacatgaactcgcaagggtcgtgaagtcggttccttcaatggt

SEQ ID NO: 2847 - DNA, 250 bp, synthetic construct
  source 1..250: mol_type = other DNA
gtatgtgcagctaactctcctcgccgcagccgaacgaccgagcgcagcgagtcagtgagcgaggaagcgtctagtgtcgctgcaaccatagtttgacataatgcaaccataccttgacataattaaagtcatactctgacataaagctaaagtcatactctgacataaaaaataaattccattaggtctgtcaggtcttctctgctacacatgaactcgcaagggtcgtgaagtcggttccttcaatggt

SEQ ID NO: 2848 - DNA, 250 bp, synthetic construct
  source 1..250: mol_type = other DNA
gtatgtgcagctaactctcctcgccgcagccgaacgaccgagcgcagcgagtcagtgagcgaggaagcgtctagtgtcgctgcaaccatagtttgacataatacaaccataccttgacataattaaagtcatactctgacataaagccccttattaaaaatgatgctaaaaataaattccattacgctacaactgtcttctctgctacacatgaactcgcaagggtcgtgaagtcggttccttcaatggt

SEQ ID NO: 2849 - DNA, 250 bp, synthetic construct
  source 1..250: mol_type = other DNA
gtatgtgcagctaactctcctcgccgcagccgaacgaccgagcgcagcgagtcagtgagcgaggaagcgtctagtgtcgctgaaaccatagtttgacataatacaaccatactatgacataattaaactatagtttgacataaaactcccttattaaaaatgatgctaaaaataaattccattagcgtagataagtcttctctgctacacatgaactcgcaagggtcgtgaagtcggttccttcaatggt

SEQ ID NO: 2850 - DNA, 250 bp, synthetic construct
  source 1..250: mol_type = other DNA
gtatgtgcagctaactctcctcgccgcagccgaacgaccgagcgcagcgagtcagtgagcgaggaagcgtctagtgtcgctgaaaccatagtttgacataatacaaccatagtgtgacataattaaaccatactttgacataaaaatcccttattaaaaatgatgctaaaaataaattccattatctttgcttggtcttctctgctacacatgaactcgcaagggtcgtgaagtcggttccttcaatggt

SEQ ID NO: 2851 - DNA, 250 bp, synthetic construct
  source 1..250: mol_type = other DNA
gtatgtgcagctaactctcctcgccgcagccgaacgaccgagcgcagcgagtcagtgagcgaggaagcgtctagtgtcgctgcaaccatagtttgacataatgcaaccataccttgacataattaaagtcatactctgacataaagccccttattaaaaatgatgctaaaaataaattccattacggacatgcagtcttctctgctacacatgaactcgcaagggtcgtgaagtcggttccttcaatggt

SEQ ID NO: 2852 - DNA, 250 bp, synthetic construct
  source 1..250: mol_type = other DNA
gtatgtgcagctaactctcctcgccgcagccgaacgaccgagcgcagcgagtcagtgagcgaggaagcgtctagtgtcgctgcaaccatagtttgacataatgcaaccataccttgacatataaagtcatactctgacataataagccccttattaaaaatgatgctaaaaataaattccattacgtcactctcgtcttctctgctacacatgaactcgcaagggtcgtgaagtcggttccttcaatggt

SEQ ID NO: 2853 - DNA, 250 bp, synthetic construct
  source 1..250: mol_type = other DNA
gtatgtgcagctaactctcctcgccgcagccgaacgaccgagcgcagcgagtcagtgagcgaggaagcgtctagtgtcgctgcaaccatagtttgacataatgcaaccataccttgacataataaagtcatactctgacatataagccccttattaaaaatgatgctaaaaataaattccattacaagtagactgtcttctctgctacacatgaactcgcaagggtcgtgaagtcggttccttcaatggt

SEQ ID NO: 2854 - DNA, 250 bp, synthetic construct
  source 1..250: mol_type = other DNA
gtatgtgcagctaactctcctcgccgcagccgaacgaccgagcgcagcgagtcagtgagcgaggaagcgtctagtgtcgctgcaaccatagtttgacataatgcaaccataccttgacataatataaagtcatactctgacataagccccttattaaaaatgatgctaaaaataaattccattaatcttcaaaggtcttctctgctacacatgaactcgcaagggtcgtgaagtcggttccttcaatggt

SEQ ID NO: 2855 - DNA, 250 bp, synthetic construct
  source 1..250: mol_type = other DNA
gtatgtgcagctaactctcctcgccgcagccgaacgaccgagcgcagcgagtcagtgagcgaggaagcgtctagtgtcgctgcaaccatagtttgacataatgcaaccataccttgacataataagtaaagtcatactctgacataccccttattaaaaatgatgctaaaaataaattccattacttaatcatagtcttctctgctacacatgaactcgcaagggtcgtgaagtcggttccttcaatggt

SEQ ID NO: 2856 - DNA, 250 bp, synthetic construct
  source 1..250: mol_type = other DNA
gtatgtgcagctaactctcctcgccgcagccgaacgaccgagcgcagcgagtcagtgagcgaggaagcgtctagtgtcgctgcaaccatagtttgacataatgcaaccataccttgacataataagcctaaagtcatactctgacataccttattaaaaatgatgctaaaaataaattccattacgactccagagtcttctctgctacacatgaactcgcaagggtcgtgaagtcggttccttcaatggt

SEQ ID NO: 2857 - DNA, 250 bp, synthetic construct
  source 1..250: mol_type = other DNA
gtatgtgcagctaactctcctcgccgcagccgaacgaccgagcgcagcgagtcagtgagcgaggaagcgtctagtgtcgctgcaaccatagtttgacataatgcaaccataccttgacataataagcccctaaagtcatactctgacatattattaaaaatgatgctaaaaataaattccattaggcataaatcgtcttctctgctacacatgaactcgcaagggtcgtgaagtcggttccttcaatggt

SEQ ID NO: 2858 - DNA, 250 bp, synthetic construct
  source 1..250: mol_type = other DNA
gtatgtgcagctaactctcctcgccgcagccgaacgaccgagcgcagcgagtcagtgagcgaggaagcgtctagtgtcgctgcaaccatagtttgacataatgcaaccataccttgacataataagcccctttaaagtcatactctgacataattaaaaatgatgctaaaaataaattccattattgataacgtgtcttctctgctacacatgaactcgcaagggtcgtgaagtcggttccttcaatggt

SEQ ID NO: 2859 - DNA, 250 bp, synthetic construct
  source 1..250: mol_type = other DNA
gtatgtgcagctaactctcctcgccgcagccgaacgaccgagcgcagcgagtcagtgagcgaggaagcgtctagtgtcgctgcaaccatagtttgacataatgcaaccataccttgacataataagccccttattaaagtcatactctgacatataaaaatgatgctaaaaataaattccattaggaacagtcagtcttctctgctacacatgaactcgcaagggtcgtgaagtcggttccttcaatggt

SEQ ID NO: 2860 - DNA, 250 bp, synthetic construct
  source 1..250: mol_type = other DNA
gtatgtgcagctaactctcctcgccgcagccgaacgaccgagcgcagcgagtcagtgagcgaggaagcgtctagtgtcgctgcaaccatagtttgacataatgcaaccataccttgacataataagccccttattataaagtcatactctgacataaaaatgatgctaaaaataaattccattatctaagggtcgtcttctctgctacacatgaactcgcaagggtcgtgaagtcggttccttcaatggt

SEQ ID NO: 2861 - DNA, 250 bp, synthetic construct
  source 1..250: mol_type = other DNA
gtatgtgcagctaactctcctcgccgcagccgaacgaccgagcgcagcgagtcagtgagcgaggaagcgtctagtgtcgctgcaaccatagtttgacataatgcaaccataccttgacataataagccccttattaaataaagtcatactctgacataaatgatgctaaaaataaattccattagggcggagtagtcttctctgctacacatgaactcgcaagggtcgtgaagtcggttccttcaatggt

SEQ ID NO: 2862 - DNA, 250 bp, synthetic construct
  source 1..250: mol_type = other DNA
gtatgtgcagctaactctcctcgccgcagccgaacgaccgagcgcagcgagtcagtgagcgaggaagcgtctagtgtcgctgcaaccatagtttgacatatgcaaccataccttgacataattaaagtcatactctgacataaaagccccttattaaaaatgatgctaaaaataaattccattagacgaatatggtcttctctgctacacatgaactcgcaagggtcgtgaagtcggttccttcaatggt

SEQ ID NO: 2863 - DNA, 250 bp, synthetic construct
  source 1..250: mol_type = other DNA
gtatgtgcagctaactctcctcgccgcagccgaacgaccgagcgcagcgagtcagtgagcgaggaagcgtctagtgtcgctgcaaccatagtttgacataaaatgcaaccataccttgacataattaaagtcatactctgacatagccccttattaaaaatgatgctaaaaataaattccattacttaacacatgtcttctctgctacacatgaactcgcaagggtcgtgaagtcggttccttcaatggt

SEQ ID NO: 2864 - DNA, 250 bp, synthetic construct
  source 1..250: mol_type = other DNA
gtatgtgcagctaactctcctcgccgcagccgaacgaccgagcgcagcgagtcagtgagcgaggaagcgtctagtgtcgctgcaaccatagtttgacataaaagctgcaaccataccttgacataattaaagtcatactctgacatacccttattaaaaatgatgctaaaaataaattccattatgttaggaatgtcttctctgctacacatgaactcgcaagggtcgtgaagtcggttccttcaatggt

SEQ ID NO: 2865 - DNA, 250 bp, synthetic construct
  source 1..250: mol_type = other DNA
gtatgtgcagctaactctcctcgccgcagccgaacgaccgagcgcagcgagtcagtgagcgaggaagcgtctagtgtcgctgcaaccatagtttgacataaaagccctgcaaccataccttgacataattaaagtcatactctgacatacttattaaaaatgatgctaaaaataaattccattatatcgttatagtcttctctgctacacatgaactcgcaagggtcgtgaagtcggttccttcaatggt

SEQ ID NO: 2866 - DNA, 250 bp, synthetic construct
  source 1..250: mol_type = other DNA
gtatgtgcagctaactctcctcgccgcagccgaacgaccgagcgcagcgagtcagtgagcgaggaagcgtctagtgtcgctgcaaccatagtttgacataaaagccccttgcaaccataccttgacataattaaagtcatactctgacatatattaaaaatgatgctaaaaataaattccattaccaatataccgtcttctctgctacacatgaactcgcaagggtcgtgaagtcggttccttcaatggt

SEQ ID NO: 2867 - DNA, 250 bp, synthetic construct
  source 1..250: mol_type = other DNA
gtatgtgcagctaactctcctcgccgcagccgaacgaccgagcgcagcgagtcagtgagcgaggaagcgtctagtgtcgctgcaaccatagtttgacataaaagccccttatgcaaccataccttgacataattaaagtcatactctgacatattaaaaatgatgctaaaaataaattccattatgtgaataaagtcttctctgctacacatgaactcgcaagggtcgtgaagtcggttccttcaatggt

SEQ ID NO: 2868 - DNA, 250 bp, synthetic construct
  source 1..250: mol_type = other DNA
gtatgtgcagctaactctcctcgccgcagccgaacgaccgagcgcagcgagtcagtgagcgaggaagcgtctagtgtcgctgcaaccatagtttgacataaaagccccttatttgcaaccataccttgacataattaaagtcatactctgacataaaaaatgatgctaaaaataaattccattatgacccatccgtcttctctgctacacatgaactcgcaagggtcgtgaagtcggttccttcaatggt

SEQ ID NO: 2869 - DNA, 250 bp, synthetic construct
  source 1..250: mol_type = other DNA
gtatgtgcagctaactctcctcgccgcagccgaacgaccgagcgcagcgagtcagtgagcgaggaagcgtctagtgtcgctgcaaccatagtttgacataaaagccccttattaatgcaaccataccttgacataattaaagtcatactctgacataaaatgatgctaaaaataaattccattagtgccaaagtgtcttctctgctacacatgaactcgcaagggtcgtgaagtcggttccttcaatggt

SEQ ID NO: 2870 - DNA, 250 bp, synthetic construct
  source 1..250: mol_type = other DNA
gtatgtgcagctaactctcctcgccgcagccgaacgaccgagcgcagcgagtcagtgagcgaggaagcgtctagtgtcgctgcaaccatagtttgacataatgcaaccatagtttgacataattgcaaccatagtttgacataaagccccttattaaaaatgatgctaaaaataaattccattatagtcccatcgtcttctctgctacacatgaactcgcaagggtcgtgaagtcggttccttcaatggt

SEQ ID NO: 2871 - DNA, 250 bp, synthetic construct
  source 1..250: mol_type = other DNA
gtatgtgcagctaactctcctcgccgcagccgaacgaccgagcgcagcgagtcagtgagcgaggaagcgtctagtgtcgctgcaaccatagtttgacataatgcaaccatagtttgacataattgcaaccataccttgacataaagccccttattaaaaatgatgctaaaaataaattccattagccttctagagtcttctctgctacacatgaactcgcaagggtcgtgaagtcggttccttcaatggt

SEQ ID NO: 2872 - DNA, 250 bp, synthetic construct
  source 1..250: mol_type = other DNA
gtatgtgcagctaactctcctcgccgcagccgaacgaccgagcgcagcgagtcagtgagcgaggaagcgtctagtgtcgctgcaaccatagtttgacataatgcaaccatagtttgacataattaaagtcatactctgacataaagccccttattaaaaatgatgctaaaaataaattccattaaagagtagtagtcttctctgctacacatgaactcgcaagggtcgtgaagtcggttccttcaatggt

SEQ ID NO: 2873 - DNA, 250 bp, synthetic construct
  source 1..250: mol_type = other DNA
gtatgtgcagctaactctcctcgccgcagccgaacgaccgagcgcagcgagtcagtgagcgaggaagcgtctagtgtcgctgcaaccatagtttgacataatgcaaccatagtttgacataattgcaagcaaagcgtgacataaagccccttattaaaaatgatgctaaaaataaattccattagggcgcctctgtcttctctgctacacatgaactcgcaagggtcgtgaagtcggttccttcaatggt

SEQ ID NO: 2874 - DNA, 250 bp, synthetic construct
  source 1..250: mol_type = other DNA
gtatgtgcagctaactctcctcgccgcagccgaacgaccgagcgcagcgagtcagtgagcgaggaagcgtctagtgtcgctgcaaccatagtttgacataatgcaaccatagtttgacataattgcaaccattcactgacataaagccccttattaaaaatgatgctaaaaataaattccattacggctatcgcgtcttctctgctacacatgaactcgcaagggtcgtgaagtcggttccttcaatggt

SEQ ID NO: 2875 - DNA, 250 bp, synthetic construct
  source 1..250: mol_type = other DNA
gtatgtgcagctaactctcctcgccgcagccgaacgaccgagcgcagcgagtcagtgagcgaggaagcgtctagtgtcgctgcaaccatagtttgacataatgcaaccatagtttgacataattgcaaccatacagtgacataaagccccttattaaaaatgatgctaaaaataaattccattagtatattcgtgtcttctctgctacacatgaactcgcaagggtcgtgaagtcggttccttcaatggt

SEQ ID NO: 2876 - DNA, 250 bp, synthetic construct
  source 1..250: mol_type = other DNA
gtatgtgcagctaactctcctcgccgcagccgaacgaccgagcgcagcgagtcagtgagcgaggaagcgtctagtgtcgctgcaaccatagtttgacataatgcaaccataccttgacataattgcaaccatagtttgacataaagccccttattaaaaatgatgctaaaaataaattccattatatatccgaagtcttctctgctacacatgaactcgcaagggtcgtgaagtcggttccttcaatggt

SEQ ID NO: 2877 - DNA, 250 bp, synthetic construct
  source 1..250: mol_type = other DNA
gtatgtgcagctaactctcctcgccgcagccgaacgaccgagcgcagcgagtcagtgagcgaggaagcgtctagtgtcgctgcaaccatagtttgacataatgcaaccataccttgacataattgcaaccataccttgacataaagccccttattaaaaatgatgctaaaaataaattccattattttgtcgtagtcttctctgctacacatgaactcgcaagggtcgtgaagtcggttccttcaatggt

SEQ ID NO: 2878 - DNA, 250 bp, synthetic construct
  source 1..250: mol_type = other DNA
gtatgtgcagctaactctcctcgccgcagccgaacgaccgagcgcagcgagtcagtgagcgaggaagcgtctagtgtcgctgcaaccatagtttgacataatgcaaccataccttgacataattaaagtcatactctgacataaagccccttattaaaaatgatgctaaaaataaattccattatttcacggtcgtcttctctgctacacatgaactcgcaagggtcgtgaagtcggttccttcaatggt

SEQ ID NO: 2879 - DNA, 250 bp, synthetic construct
  source 1..250: mol_type = other DNA
gtatgtgcagctaactctcctcgccgcagccgaacgaccgagcgcagcgagtcagtgagcgaggaagcgtctagtgtcgctgcaaccatagtttgacataatgcaaccataccttgacataattgcaagcaaagcgtgacataaagccccttattaaaaatgatgctaaaaataaattccattattaggccacagtcttctctgctacacatgaactcgcaagggtcgtgaagtcggttccttcaatggt

SEQ ID NO: 2880 - DNA, 250 bp, synthetic construct
  source 1..250: mol_type = other DNA
gtatgtgcagctaactctcctcgccgcagccgaacgaccgagcgcagcgagtcagtgagcgaggaagcgtctagtgtcgctgcaaccatagtttgacataatgcaaccataccttgacataattgcaaccattcactgacataaagccccttattaaaaatgatgctaaaaataaattccattacgttatttttgtcttctctgctacacatgaactcgcaagggtcgtgaagtcggttccttcaatggt

SEQ ID NO: 2881 - DNA, 250 bp, synthetic construct
  source 1..250: mol_type = other DNA
gtatgtgcagctaactctcctcgccgcagccgaacgaccgagcgcagcgagtcagtgagcgaggaagcgtctagtgtcgctgcaaccatagtttgacataatgcaaccataccttgacataattgcaaccatacagtgacataaagccccttattaaaaatgatgctaaaaataaattccattaagcggtataagtcttctctgctacacatgaactcgcaagggtcgtgaagtcggttccttcaatggt

SEQ ID NO: 2882 - DNA, 250 bp, synthetic construct
  source 1..250: mol_type = other DNA
gtatgtgcagctaactctcctcgccgcagccgaacgaccgagcgcagcgagtcagtgagcgaggaagcgtctagtgtcgctgcaaccatagtttgacataataaagtcatactctgacataattgcaaccatagtttgacataaagccccttattaaaaatgatgctaaaaataaattccattaccgtcgaagagtcttctctgctacacatgaactcgcaagggtcgtgaagtcggttccttcaatggt

SEQ ID NO: 2883 - DNA, 250 bp, synthetic construct
  source 1..250: mol_type = other DNA
gtatgtgcagctaactctcctcgccgcagccgaacgaccgagcgcagcgagtcagtgagcgaggaagcgtctagtgtcgctgcaaccatagtttgacataataaagtcatactctgacataattgcaaccataccttgacataaagccccttattaaaaatgatgctaaaaataaattccattaggcttgtactgtcttctctgctacacatgaactcgcaagggtcgtgaagtcggttccttcaatggt

SEQ ID NO: 2884 - DNA, 250 bp, synthetic construct
  source 1..250: mol_type = other DNA
gtatgtgcagctaactctcctcgccgcagccgaacgaccgagcgcagcgagtcagtgagcgaggaagcgtctagtgtcgctgcaaccatagtttgacataataaagtcatactctgacataattaaagtcatactctgacataaagccccttattaaaaatgatgctaaaaataaattccattagtggatgttggtcttctctgctacacatgaactcgcaagggtcgtgaagtcggttccttcaatggt

SEQ ID NO: 2885 - DNA, 250 bp, synthetic construct
  source 1..250: mol_type = other DNA
gtatgtgcagctaactctcctcgccgcagccgaacgaccgagcgcagcgagtcagtgagcgaggaagcgtctagtgtcgctgcaaccatagtttgacataataaagtcatactctgacataattgcaagcaaagcgtgacataaagccccttattaaaaatgatgctaaaaataaattccattaagaccgtccagtcttctctgctacacatgaactcgcaagggtcgtgaagtcggttccttcaatggt

SEQ ID NO: 2886 - DNA, 250 bp, synthetic construct
  source 1..250: mol_type = other DNA
gtatgtgcagctaactctcctcgccgcagccgaacgaccgagcgcagcgagtcagtgagcgaggaagcgtctagtgtcgctgcaaccatagtttgacataataaagtcatactctgacataattgcaaccattcactgacataaagccccttattaaaaatgatgctaaaaataaattccattaagatggaagggtcttctctgctacacatgaactcgcaagggtcgtgaagtcggttccttcaatggt

SEQ ID NO: 2887 - DNA, 250 bp, synthetic construct
  source 1..250: mol_type = other DNA
gtatgtgcagctaactctcctcgccgcagccgaacgaccgagcgcagcgagtcagtgagcgaggaagcgtctagtgtcgctgcaaccatagtttgacataataaagtcatactctgacataattgcaaccatacagtgacataaagccccttattaaaaatgatgctaaaaataaattccattaacagtggctcgtcttctctgctacacatgaactcgcaagggtcgtgaagtcggttccttcaatggt

SEQ ID NO: 2888 - DNA, 250 bp, synthetic construct
  source 1..250: mol_type = other DNA
gtatgtgcagctaactctcctcgccgcagccgaacgaccgagcgcagcgagtcagtgagcgaggaagcgtctagtgtcgctgcaaccatagtttgacataatgcaagcaaagcgtgacataattgcaaccatagtttgacataaagccccttattaaaaatgatgctaaaaataaattccattagggtctggtagtcttctctgctacacatgaactcgcaagggtcgtgaagtcggttccttcaatggt

SEQ ID NO: 2889 - DNA, 250 bp, synthetic construct
  source 1..250: mol_type = other DNA
gtatgtgcagctaactctcctcgccgcagccgaacgaccgagcgcagcgagtcagtgagcgaggaagcgtctagtgtcgctgcaaccatagtttgacataatgcaagcaaagcgtgacataattgcaaccataccttgacataaagccccttattaaaaatgatgctaaaaataaattccattacacaaggtcggtcttctctgctacacatgaactcgcaagggtcgtgaagtcggttccttcaatggt

SEQ ID NO: 2890 - DNA, 250 bp, synthetic construct
  source 1..250: mol_type = other DNA
gtatgtgcagctaactctcctcgccgcagccgaacgaccgagcgcagcgagtcagtgagcgaggaagcgtctagtgtcgctgcaaccatagtttgacataatgcaagcaaagcgtgacataattaaagtcatactctgacataaagccccttattaaaaatgatgctaaaaataaattccattaggcgcaaaaagtcttctctgctacacatgaactcgcaagggtcgtgaagtcggttccttcaatggt

SEQ ID NO: 2891 - DNA, 250 bp, synthetic construct
  source 1..250: mol_type = other DNA
gtatgtgcagctaactctcctcgccgcagccgaacgaccgagcgcagcgagtcagtgagcgaggaagcgtctagtgtcgctgcaaccatagtttgacataatgcaagcaaagcgtgacataattgcaagcaaagcgtgacataaagccccttattaaaaatgatgctaaaaataaattccattaccggtagacagtcttctctgctacacatgaactcgcaagggtcgtgaagtcggttccttcaatggt

SEQ ID NO: 2892 - DNA, 250 bp, synthetic construct
  source 1..250: mol_type = other DNA
gtatgtgcagctaactctcctcgccgcagccgaacgaccgagcgcagcgagtcagtgagcgaggaagcgtctagtgtcgctgcaaccatagtttgacataatgcaagcaaagcgtgacataattgcaaccattcactgacataaagccccttattaaaaatgatgctaaaaataaattccattagacaacgaccgtcttctctgctacacatgaactcgcaagggtcgtgaagtcggttccttcaatggt

SEQ ID NO: 2893 - DNA, 250 bp, synthetic construct
  source 1..250: mol_type = other DNA
gtatgtgcagctaactctcctcgccgcagccgaacgaccgagcgcagcgagtcagtgagcgaggaagcgtctagtgtcgctgcaaccatagtttgacataatgcaagcaaagcgtgacataattgcaaccatacagtgacataaagccccttattaaaaatgatgctaaaaataaattccattaatcgctgatcgtcttctctgctacacatgaactcgcaagggtcgtgaagtcggttccttcaatggt

SEQ ID NO: 2894 - DNA, 250 bp, synthetic construct
  source 1..250: mol_type = other DNA
gtatgtgcagctaactctcctcgccgcagccgaacgaccgagcgcagcgagtcagtgagcgaggaagcgtctagtgtcgctgcaaccatagtttgacataatgcaaccattcactgacataattgcaaccatagtttgacataaagccccttattaaaaatgatgctaaaaataaattccattaatagcgcaacgtcttctctgctacacatgaactcgcaagggtcgtgaagtcggttccttcaatggt

SEQ ID NO: 2895 - DNA, 250 bp, synthetic construct
  source 1..250: mol_type = other DNA
gtatgtgcagctaactctcctcgccgcagccgaacgaccgagcgcagcgagtcagtgagcgaggaagcgtctagtgtcgctgcaaccatagtttgacataatgcaaccattcactgacataattgcaaccataccttgacataaagccccttattaaaaatgatgctaaaaataaattccattactaactcgcggtcttctctgctacacatgaactcgcaagggtcgtgaagtcggttccttcaatggt

SEQ ID NO: 2896 - DNA, 250 bp, synthetic construct
  source 1..250: mol_type = other DNA
gtatgtgcagctaactctcctcgccgcagccgaacgaccgagcgcagcgagtcagtgagcgaggaagcgtctagtgtcgctgcaaccatagtttgacataatgcaaccattcactgacataattaaagtcatactctgacataaagccccttattaaaaatgatgctaaaaataaattccattatcgctaacccgtcttctctgctacacatgaactcgcaagggtcgtgaagtcggttccttcaatggt

SEQ ID NO: 2897 - DNA, 250 bp, synthetic construct
  source 1..250: mol_type = other DNA
gtatgtgcagctaactctcctcgccgcagccgaacgaccgagcgcagcgagtcagtgagcgaggaagcgtctagtgtcgctgcaaccatagtttgacataatgcaaccattcactgacataattgcaagcaaagcgtgacataaagccccttattaaaaatgatgctaaaaataaattccattaaatcggtactgtcttctctgctacacatgaactcgcaagggtcgtgaagtcggttccttcaatggt

SEQ ID NO: 2898 - DNA, 250 bp, synthetic construct
  source 1..250: mol_type = other DNA
gtatgtgcagctaactctcctcgccgcagccgaacgaccgagcgcagcgagtcagtgagcgaggaagcgtctagtgtcgctgcaaccatagtttgacataatgcaaccattcactgacataattgcaaccattcactgacataaagccccttattaaaaatgatgctaaaaataaattccattacttctgaatagtcttctctgctacacatgaactcgcaagggtcgtgaagtcggttccttcaatggt

SEQ ID NO: 2899 - DNA, 250 bp, synthetic construct
  source 1..250: mol_type = other DNA
gtatgtgcagctaactctcctcgccgcagccgaacgaccgagcgcagcgagtcagtgagcgaggaagcgtctagtgtcgctgcaaccatagtttgacataatgcaaccattcactgacataattgcaaccatacagtgacataaagccccttattaaaaatgatgctaaaaataaattccattagatgtatggcgtcttctctgctacacatgaactcgcaagggtcgtgaagtcggttccttcaatggt

SEQ ID NO: 2900 - DNA, 250 bp, synthetic construct
  source 1..250: mol_type = other DNA
gtatgtgcagctaactctcctcgccgcagccgaacgaccgagcgcagcgagtcagtgagcgaggaagcgtctagtgtcgctgcaaccatagtttgacataatgcaaccatacagtgacataattgcaaccatagtttgacataaagccccttattaaaaatgatgctaaaaataaattccattaggccctacctgtcttctctgctacacatgaactcgcaagggtcgtgaagtcggttccttcaatggt

SEQ ID NO: 2901 - DNA, 250 bp, synthetic construct
  source 1..250: mol_type = other DNA
gtatgtgcagctaactctcctcgccgcagccgaacgaccgagcgcagcgagtcagtgagcgaggaagcgtctagtgtcgctgcaaccatagtttgacataatgcaaccatacagtgacataattgcaaccataccttgacataaagccccttattaaaaatgatgctaaaaataaattccattaccggaagggcgtcttctctgctacacatgaactcgcaagggtcgtgaagtcggttccttcaatggt

SEQ ID NO: 2902 - DNA, 250 bp, synthetic construct
  source 1..250: mol_type = other DNA
gtatgtgcagctaactctcctcgccgcagccgaacgaccgagcgcagcgagtcagtgagcgaggaagcgtctagtgtcgctgcaaccatagtttgacataatgcaaccatacagtgacataattaaagtcatactctgacataaagccccttattaaaaatgatgctaaaaataaattccattaactagcctcggtcttctctgctacacatgaactcgcaagggtcgtgaagtcggttccttcaatggt

SEQ ID NO: 2903 - DNA, 250 bp, synthetic construct
  source 1..250: mol_type = other DNA
gtatgtgcagctaactctcctcgccgcagccgaacgaccgagcgcagcgagtcagtgagcgaggaagcgtctagtgtcgctgcaaccatagtttgacataatgcaaccatacagtgacataattgcaagcaaagcgtgacataaagccccttattaaaaatgatgctaaaaataaattccattagttctccagagtcttctctgctacacatgaactcgcaagggtcgtgaagtcggttccttcaatggt

SEQ ID NO: 2904 - DNA, 250 bp, synthetic construct
  source 1..250: mol_type = other DNA
gtatgtgcagctaactctcctcgccgcagccgaacgaccgagcgcagcgagtcagtgagcgaggaagcgtctagtgtcgctgcaaccatagtttgacataatgcaaccatacagtgacataattgcaaccattcactgacataaagccccttattaaaaatgatgctaaaaataaattccattatcaggctaatgtcttctctgctacacatgaactcgcaagggtcgtgaagtcggttccttcaatggt

SEQ ID NO: 2905 - DNA, 250 bp, synthetic construct
  source 1..250: mol_type = other DNA
gtatgtgcagctaactctcctcgccgcagccgaacgaccgagcgcagcgagtcagtgagcgaggaagcgtctagtgtcgctgcaaccatagtttgacataatgcaaccatacagtgacataattgcaaccatacagtgacataaagccccttattaaaaatgatgctaaaaataaattccattactgtgcccgggtcttctctgctacacatgaactcgcaagggtcgtgaagtcggttccttcaatggt

SEQ ID NO: 2906 - DNA, 250 bp, synthetic construct
  source 1..250: mol_type = other DNA
gtatgtgcagctaactctcctcgccgcagccgaacgaccgagcgcagcgagtcagtgagcgaggaagcgtctagtgtcgctgcaaccataccttgacataatgcaaccatagtttgacataattgcaaccatagtttgacataaagccccttattaaaaatgatgctaaaaataaattccattatatgtggcctgtcttctctgctacacatgaactcgcaagggtcgtgaagtcggttccttcaatggt

SEQ ID NO: 2907 - DNA, 250 bp, synthetic construct
  source 1..250: mol_type = other DNA
gtatgtgcagctaactctcctcgccgcagccgaacgaccgagcgcagcgagtcagtgagcgaggaagcgtctagtgtcgctgcaaccataccttgacataatgcaaccatagtttgacataattgcaaccataccttgacataaagccccttattaaaaatgatgctaaaaataaattccattatacccagccggtcttctctgctacacatgaactcgcaagggtcgtgaagtcggttccttcaatggt

SEQ ID NO: 2908 - DNA, 250 bp, synthetic construct
  source 1..250: mol_type = other DNA
gtatgtgcagctaactctcctcgccgcagccgaacgaccgagcgcagcgagtcagtgagcgaggaagcgtctagtgtcgctgcaaccataccttgacataatgcaaccatagtttgacataattaaagtcatactctgacataaagccccttattaaaaatgatgctaaaaataaattccattacgggaaagtggtcttctctgctacacatgaactcgcaagggtcgtgaagtcggttccttcaatggt

SEQ ID NO: 2909 - DNA, 250 bp, synthetic construct
  source 1..250: mol_type = other DNA
gtatgtgcagctaactctcctcgccgcagccgaacgaccgagcgcagcgagtcagtgagcgaggaagcgtctagtgtcgctgcaaccataccttgacataatgcaaccatagtttgacataattgcaagcaaagcgtgacataaagccccttattaaaaatgatgctaaaaataaattccattattgtcactgagtcttctctgctacacatgaactcgcaagggtcgtgaagtcggttccttcaatggt

SEQ ID NO: 2910 - DNA, 250 bp, synthetic construct
  source 1..250: mol_type = other DNA
gtatgtgcagctaactctcctcgccgcagccgaacgaccgagcgcagcgagtcagtgagcgaggaagcgtctagtgtcgctgcaaccataccttgacataatgcaaccatagtttgacataattgcaaccattcactgacataaagccccttattaaaaatgatgctaaaaataaattccattatgaccaaggagtcttctctgctacacatgaactcgcaagggtcgtgaagtcggttccttcaatggt

SEQ ID NO: 2911 - DNA, 250 bp, synthetic construct
  source 1..250: mol_type = other DNA
gtatgtgcagctaactctcctcgccgcagccgaacgaccgagcgcagcgagtcagtgagcgaggaagcgtctagtgtcgctgcaaccataccttgacataatgcaaccatagtttgacataattgcaaccatacagtgacataaagccccttattaaaaatgatgctaaaaataaattccattagtattatgtcgtcttctctgctacacatgaactcgcaagggtcgtgaagtcggttccttcaatggt

SEQ ID NO: 2912 - DNA, 250 bp, synthetic construct
  source 1..250: mol_type = other DNA
gtatgtgcagctaactctcctcgccgcagccgaacgaccgagcgcagcgagtcagtgagcgaggaagcgtctagtgtcgctgcaaccataccttgacataatgcaaccataccttgacataattgcaaccatagtttgacataaagccccttattaaaaatgatgctaaaaataaattccattagaagagattagtcttctctgctacacatgaactcgcaagggtcgtgaagtcggttccttcaatggt

SEQ ID NO: 2913 - DNA, 250 bp, synthetic construct
  source 1..250: mol_type = other DNA
gtatgtgcagctaactctcctcgccgcagccgaacgaccgagcgcagcgagtcagtgagcgaggaagcgtctagtgtcgctgcaaccataccttgacataatgcaaccataccttgacataattgcaaccataccttgacataaagccccttattaaaaatgatgctaaaaataaattccattaggccgttccagtcttctctgctacacatgaactcgcaagggtcgtgaagtcggttccttcaatggt

SEQ ID NO: 2914 - DNA, 250 bp, synthetic construct
  source 1..250: mol_type = other DNA
gtatgtgcagctaactctcctcgccgcagccgaacgaccgagcgcagcgagtcagtgagcgaggaagcgtctagtgtcgctgcaaccataccttgacataatgcaaccataccttgacataattaaagtcatactctgacataaagccccttattaaaaatgatgctaaaaataaattccattactcggcgctggtcttctctgctacacatgaactcgcaagggtcgtgaagtcggttccttcaatggt

SEQ ID NO: 2915 - DNA, 250 bp, synthetic construct
  source 1..250: mol_type = other DNA
gtatgtgcagctaactctcctcgccgcagccgaacgaccgagcgcagcgagtcagtgagcgaggaagcgtctagtgtcgctgcaaccataccttgacataatgcaaccataccttgacataattgcaagcaaagcgtgacataaagccccttattaaaaatgatgctaaaaataaattccattaataccctgtggtcttctctgctacacatgaactcgcaagggtcgtgaagtcggttccttcaatggt

SEQ ID NO: 2916 - DNA, 250 bp, synthetic construct
  source 1..250: mol_type = other DNA
gtatgtgcagctaactctcctcgccgcagccgaacgaccgagcgcagcgagtcagtgagcgaggaagcgtctagtgtcgctgcaaccataccttgacataatgcaaccataccttgacataattgcaaccattcactgacataaagccccttattaaaaatgatgctaaaaataaattccattatgggcgctctgtcttctctgctacacatgaactcgcaagggtcgtgaagtcggttccttcaatggt

SEQ ID NO: 2917 - DNA, 250 bp, synthetic construct
  source 1..250: mol_type = other DNA
gtatgtgcagctaactctcctcgccgcagccgaacgaccgagcgcagcgagtcagtgagcgaggaagcgtctagtgtcgctgcaaccataccttgacataatgcaaccataccttgacataattgcaaccatacagtgacataaagccccttattaaaaatgatgctaaaaataaattccattactattaagccgtcttctctgctacacatgaactcgcaagggtcgtgaagtcggttccttcaatggt

SEQ ID NO: 2918 - DNA, 250 bp, synthetic construct
  source 1..250: mol_type = other DNA
gtatgtgcagctaactctcctcgccgcagccgaacgaccgagcgcagcgagtcagtgagcgaggaagcgtctagtgtcgctgcaaccataccttgacataataaagtcatactctgacataattgcaaccatagtttgacataaagccccttattaaaaatgatgctaaaaataaattccattacaccagggtggtcttctctgctacacatgaactcgcaagggtcgtgaagtcggttccttcaatggt

SEQ ID NO: 2919 - DNA, 250 bp, synthetic construct
  source 1..250: mol_type = other DNA
gtatgtgcagctaactctcctcgccgcagccgaacgaccgagcgcagcgagtcagtgagcgaggaagcgtctagtgtcgctgcaaccataccttgacataataaagtcatactctgacataattgcaaccataccttgacataaagccccttattaaaaatgatgctaaaaataaattccattaaatccgaagcgtcttctctgctacacatgaactcgcaagggtcgtgaagtcggttccttcaatggt

SEQ ID NO: 2920 - DNA, 250 bp, synthetic construct
  source 1..250: mol_type = other DNA
gtatgtgcagctaactctcctcgccgcagccgaacgaccgagcgcagcgagtcagtgagcgaggaagcgtctagtgtcgctgcaaccataccttgacataataaagtcatactctgacataattaaagtcatactctgacataaagccccttattaaaaatgatgctaaaaataaattccattaaatatacttagtcttctctgctacacatgaactcgcaagggtcgtgaagtcggttccttcaatggt

SEQ ID NO: 2921 - DNA, 250 bp, synthetic construct
  source 1..250: mol_type = other DNA
gtatgtgcagctaactctcctcgccgcagccgaacgaccgagcgcagcgagtcagtgagcgaggaagcgtctagtgtcgctgcaaccataccttgacataataaagtcatactctgacataattgcaagcaaagcgtgacataaagccccttattaaaaatgatgctaaaaataaattccattacagttacagagtcttctctgctacacatgaactcgcaagggtcgtgaagtcggttccttcaatggt

SEQ ID NO: 2922 - DNA, 250 bp, synthetic construct
  source 1..250: mol_type = other DNA
gtatgtgcagctaactctcctcgccgcagccgaacgaccgagcgcagcgagtcagtgagcgaggaagcgtctagtgtcgctgcaaccataccttgacataataaagtcatactctgacataattgcaaccattcactgacataaagccccttattaaaaatgatgctaaaaataaattccattactcatgcgatgtcttctctgctacacatgaactcgcaagggtcgtgaagtcggttccttcaatggt

SEQ ID NO: 2923 - DNA, 250 bp, synthetic construct
  source 1..250: mol_type = other DNA
gtatgtgcagctaactctcctcgccgcagccgaacgaccgagcgcagcgagtcagtgagcgaggaagcgtctagtgtcgctgcaaccataccttgacataataaagtcatactctgacataattgcaaccatacagtgacataaagccccttattaaaaatgatgctaaaaataaattccattaagtaacactcgtcttctctgctacacatgaactcgcaagggtcgtgaagtcggttccttcaatggt

SEQ ID NO: 2924 - DNA, 250 bp, synthetic construct
  source 1..250: mol_type = other DNA
gtatgtgcagctaactctcctcgccgcagccgaacgaccgagcgcagcgagtcagtgagcgaggaagcgtctagtgtcgctgcaaccataccttgacataatgcaagcaaagcgtgacataattgcaaccatagtttgacataaagccccttattaaaaatgatgctaaaaataaattccattagttcgtaactgtcttctctgctacacatgaactcgcaagggtcgtgaagtcggttccttcaatggt

SEQ ID NO: 2925 - DNA, 250 bp, synthetic construct
  source 1..250: mol_type = other DNA
gtatgtgcagctaactctcctcgccgcagccgaacgaccgagcgcagcgagtcagtgagcgaggaagcgtctagtgtcgctgcaaccataccttgacataatgcaagcaaagcgtgacataattgcaaccataccttgacataaagccccttattaaaaatgatgctaaaaataaattccattatacttacattgtcttctctgctacacatgaactcgcaagggtcgtgaagtcggttccttcaatggt

SEQ ID NO: 2926 - DNA, 250 bp, synthetic construct
  source 1..250: mol_type = other DNA
gtatgtgcagctaactctcctcgccgcagccgaacgaccgagcgcagcgagtcagtgagcgaggaagcgtctagtgtcgctgcaaccataccttgacataatgcaagcaaagcgtgacataattaaagtcatactctgacataaagccccttattaaaaatgatgctaaaaataaattccattaaagcgataacgtcttctctgctacacatgaactcgcaagggtcgtgaagtcggttccttcaatggt

SEQ ID NO: 2927 - DNA, 250 bp, synthetic construct
  source 1..250: mol_type = other DNA
gtatgtgcagctaactctcctcgccgcagccgaacgaccgagcgcagcgagtcagtgagcgaggaagcgtctagtgtcgctgcaaccataccttgacataatgcaagcaaagcgtgacataattgcaagcaaagcgtgacataaagccccttattaaaaatgatgctaaaaataaattccattaatcactatatgtcttctctgctacacatgaactcgcaagggtcgtgaagtcggttccttcaatggt

SEQ ID NO: 2928 - DNA, 250 bp, synthetic construct
  source 1..250: mol_type = other DNA
gtatgtgcagctaactctcctcgccgcagccgaacgaccgagcgcagcgagtcagtgagcgaggaagcgtctagtgtcgctgcaaccataccttgacataatgcaagcaaagcgtgacataattgcaaccattcactgacataaagccccttattaaaaatgatgctaaaaataaattccattaggattaattagtcttctctgctacacatgaactcgcaagggtcgtgaagtcggttccttcaatggt

SEQ ID NO: 2929 - DNA, 250 bp, synthetic construct
  source 1..250: mol_type = other DNA
gtatgtgcagctaactctcctcgccgcagccgaacgaccgagcgcagcgagtcagtgagcgaggaagcgtctagtgtcgctgcaaccataccttgacataatgcaagcaaagcgtgacataattgcaaccatacagtgacataaagccccttattaaaaatgatgctaaaaataaattccattagttgacgactgtcttctctgctacacatgaactcgcaagggtcgtgaagtcggttccttcaatggt

SEQ ID NO: 2930 - DNA, 250 bp, synthetic construct
  source 1..250: mol_type = other DNA
gtatgtgcagctaactctcctcgccgcagccgaacgaccgagcgcagcgagtcagtgagcgaggaagcgtctagtgtcgctgcaaccataccttgacataatgcaaccattcactgacataattgcaaccatagtttgacataaagccccttattaaaaatgatgctaaaaataaattccattatgggctgattgtcttctctgctacacatgaactcgcaagggtcgtgaagtcggttccttcaatggt

SEQ ID NO: 2931 - DNA, 250 bp, synthetic construct
  source 1..250: mol_type = other DNA
gtatgtgcagctaactctcctcgccgcagccgaacgaccgagcgcagcgagtcagtgagcgaggaagcgtctagtgtcgctgcaaccataccttgacataatgcaaccattcactgacataattgcaaccataccttgacataaagccccttattaaaaatgatgctaaaaataaattccattagtaccccgttgtcttctctgctacacatgaactcgcaagggtcgtgaagtcggttccttcaatggt

SEQ ID NO: 2932 - DNA, 250 bp, synthetic construct
  source 1..250: mol_type = other DNA
gtatgtgcagctaactctcctcgccgcagccgaacgaccgagcgcagcgagtcagtgagcgaggaagcgtctagtgtcgctgcaaccataccttgacataatgcaaccattcactgacataattaaagtcatactctgacataaagccccttattaaaaatgatgctaaaaataaattccattaccctcatatcgtcttctctgctacacatgaactcgcaagggtcgtgaagtcggttccttcaatggt

SEQ ID NO: 2933 - DNA, 250 bp, synthetic construct
  source 1..250: mol_type = other DNA
gtatgtgcagctaactctcctcgccgcagccgaacgaccgagcgcagcgagtcagtgagcgaggaagcgtctagtgtcgctgcaaccataccttgacataatgcaaccattcactgacataattgcaagcaaagcgtgacataaagccccttattaaaaatgatgctaaaaataaattccattaagtcagaagggtcttctctgctacacatgaactcgcaagggtcgtgaagtcggttccttcaatggt

SEQ ID NO: 2934 - DNA, 250 bp, synthetic construct
  source 1..250: mol_type = other DNA
gtatgtgcagctaactctcctcgccgcagccgaacgaccgagcgcagcgagtcagtgagcgaggaagcgtctagtgtcgctgcaaccataccttgacataatgcaaccattcactgacataattgcaaccattcactgacataaagccccttattaaaaatgatgctaaaaataaattccattagcgggccctcgtcttctctgctacacatgaactcgcaagggtcgtgaagtcggttccttcaatggt

SEQ ID NO: 2935 - DNA, 250 bp, synthetic construct
  source 1..250: mol_type = other DNA
gtatgtgcagctaactctcctcgccgcagccgaacgaccgagcgcagcgagtcagtgagcgaggaagcgtctagtgtcgctgcaaccataccttgacataatgcaaccattcactgacataattgcaaccatacagtgacataaagccccttattaaaaatgatgctaaaaataaattccattaagatcagttggtcttctctgctacacatgaactcgcaagggtcgtgaagtcggttccttcaatggt

SEQ ID NO: 2936 - DNA, 250 bp, synthetic construct
  source 1..250: mol_type = other DNA
gtatgtgcagctaactctcctcgccgcagccgaacgaccgagcgcagcgagtcagtgagcgaggaagcgtctagtgtcgctgcaaccataccttgacataatgcaaccatacagtgacataattgcaaccatagtttgacataaagccccttattaaaaatgatgctaaaaataaattccattatcggataccagtcttctctgctacacatgaactcgcaagggtcgtgaagtcggttccttcaatggt

SEQ ID NO: 2937 - DNA, 250 bp, synthetic construct
  source 1..250: mol_type = other DNA
gtatgtgcagctaactctcctcgccgcagccgaacgaccgagcgcagcgagtcagtgagcgaggaagcgtctagtgtcgctgcaaccataccttgacataatgcaaccatacagtgacataattgcaaccataccttgacataaagccccttattaaaaatgatgctaaaaataaattccattaaaagttgtgcgtcttctctgctacacatgaactcgcaagggtcgtgaagtcggttccttcaatggt

SEQ ID NO: 2938 - DNA, 250 bp, synthetic construct
  source 1..250: mol_type = other DNA
gtatgtgcagctaactctcctcgccgcagccgaacgaccgagcgcagcgagtcagtgagcgaggaagcgtctagtgtcgctgcaaccataccttgacataatgcaaccatacagtgacataattaaagtcatactctgacataaagccccttattaaaaatgatgctaaaaataaattccattaattttacaacgtcttctctgctacacatgaactcgcaagggtcgtgaagtcggttccttcaatggt

SEQ ID NO: 2939 - DNA, 250 bp, synthetic construct
  source 1..250: mol_type = other DNA
gtatgtgcagctaactctcctcgccgcagccgaacgaccgagcgcagcgagtcagtgagcgaggaagcgtctagtgtcgctgcaaccataccttgacataatgcaaccatacagtgacataattgcaagcaaagcgtgacataaagccccttattaaaaatgatgctaaaaataaattccattagtaacgtcaggtcttctctgctacacatgaactcgcaagggtcgtgaagtcggttccttcaatggt

SEQ ID NO: 2940 - DNA, 250 bp, synthetic construct
  source 1..250: mol_type = other DNA
gtatgtgcagctaactctcctcgccgcagccgaacgaccgagcgcagcgagtcagtgagcgaggaagcgtctagtgtcgctgcaaccataccttgacataatgcaaccatacagtgacataattgcaaccattcactgacataaagccccttattaaaaatgatgctaaaaataaattccattaaaggcttagggtcttctctgctacacatgaactcgcaagggtcgtgaagtcggttccttcaatggt

SEQ ID NO: 2941 - DNA, 250 bp, synthetic construct
  source 1..250: mol_type = other DNA
gtatgtgcagctaactctcctcgccgcagccgaacgaccgagcgcagcgagtcagtgagcgaggaagcgtctagtgtcgctgcaaccataccttgacataatgcaaccatacagtgacataattgcaaccatacagtgacataaagccccttattaaaaatgatgctaaaaataaattccattagggcggggacgtcttctctgctacacatgaactcgcaagggtcgtgaagtcggttccttcaatggt

SEQ ID NO: 2942 - DNA, 250 bp, synthetic construct
  source 1..250: mol_type = other DNA
gtatgtgcagctaactctcctcgccgcagccgaacgaccgagcgcagcgagtcagtgagcgaggaagcgtctagtgtcgctaaagtcatactctgacataatgcaaccatagtttgacataattgcaaccatagtttgacataaagccccttattaaaaatgatgctaaaaataaattccattatgttccgatagtcttctctgctacacatgaactcgcaagggtcgtgaagtcggttccttcaatggt

SEQ ID NO: 2943 - DNA, 250 bp, synthetic construct
  source 1..250: mol_type = other DNA
gtatgtgcagctaactctcctcgccgcagccgaacgaccgagcgcagcgagtcagtgagcgaggaagcgtctagtgtcgctaaagtcatactctgacataatgcaaccatagtttgacataattgcaaccataccttgacataaagccccttattaaaaatgatgctaaaaataaattccattagccatatttcgtcttctctgctacacatgaactcgcaagggtcgtgaagtcggttccttcaatggt

SEQ ID NO: 2944 - DNA, 250 bp, synthetic construct
  source 1..250: mol_type = other DNA
gtatgtgcagctaactctcctcgccgcagccgaacgaccgagcgcagcgagtcagtgagcgaggaagcgtctagtgtcgctaaagtcatactctgacataatgcaaccatagtttgacataattaaagtcatactctgacataaagccccttattaaaaatgatgctaaaaataaattccattacatcgggcccgtcttctctgctacacatgaactcgcaagggtcgtgaagtcggttccttcaatggt

SEQ ID NO: 2945 - DNA, 250 bp, synthetic construct
  source 1..250: mol_type = other DNA
gtatgtgcagctaactctcctcgccgcagccgaacgaccgagcgcagcgagtcagtgagcgaggaagcgtctagtgtcgctaaagtcatactctgacataatgcaaccatagtttgacataattgcaagcaaagcgtgacataaagccccttattaaaaatgatgctaaaaataaattccattaccttcgccgagtcttctctgctacacatgaactcgcaagggtcgtgaagtcggttccttcaatggt

SEQ ID NO: 2946 - DNA, 250 bp, synthetic construct
  source 1..250: mol_type = other DNA
gtatgtgcagctaactctcctcgccgcagccgaacgaccgagcgcagcgagtcagtgagcgaggaagcgtctagtgtcgctaaagtcatactctgacataatgcaaccatagtttgacataattgcaaccattcactgacataaagccccttattaaaaatgatgctaaaaataaattccattagcttgtattggtcttctctgctacacatgaactcgcaagggtcgtgaagtcggttccttcaatggt

SEQ ID NO: 2947 - DNA, 250 bp, synthetic construct
  source 1..250: mol_type = other DNA
gtatgtgcagctaactctcctcgccgcagccgaacgaccgagcgcagcgagtcagtgagcgaggaagcgtctagtgtcgctaaagtcatactctgacataatgcaaccatagtttgacataattgcaaccatacagtgacataaagccccttattaaaaatgatgctaaaaataaattccattaatgagcgctagtcttctctgctacacatgaactcgcaagggtcgtgaagtcggttccttcaatggt

SEQ ID NO: 2948 - DNA, 250 bp, synthetic construct
  source 1..250: mol_type = other DNA
gtatgtgcagctaactctcctcgccgcagccgaacgaccgagcgcagcgagtcagtgagcgaggaagcgtctagtgtcgctaaagtcatactctgacataatgcaaccataccttgacataattgcaaccatagtttgacataaagccccttattaaaaatgatgctaaaaataaattccattatacgagtaacgtcttctctgctacacatgaactcgcaagggtcgtgaagtcggttccttcaatggt

SEQ ID NO: 2949 - DNA, 250 bp, synthetic construct
  source 1..250: mol_type = other DNA
gtatgtgcagctaactctcctcgccgcagccgaacgaccgagcgcagcgagtcagtgagcgaggaagcgtctagtgtcgctaaagtcatactctgacataatgcaaccataccttgacataattgcaaccataccttgacataaagccccttattaaaaatgatgctaaaaataaattccattacaaaggagctgtcttctctgctacacatgaactcgcaagggtcgtgaagtcggttccttcaatggt

SEQ ID NO: 2950 - DNA, 250 bp, synthetic construct
  source 1..250: mol_type = other DNA
gtatgtgcagctaactctcctcgccgcagccgaacgaccgagcgcagcgagtcagtgagcgaggaagcgtctagtgtcgctaaagtcatactctgacataatgcaaccataccttgacataattaaagtcatactctgacataaagccccttattaaaaatgatgctaaaaataaattccattataacatgcttgtcttctctgctacacatgaactcgcaagggtcgtgaagtcggttccttcaatggt

SEQ ID NO: 2951 - DNA, 250 bp, synthetic construct
  source 1..250: mol_type = other DNA
gtatgtgcagctaactctcctcgccgcagccgaacgaccgagcgcagcgagtcagtgagcgaggaagcgtctagtgtcgctaaagtcatactctgacataatgcaaccataccttgacataattgcaagcaaagcgtgacataaagccccttattaaaaatgatgctaaaaataaattccattaggccagcatggtcttctctgctacacatgaactcgcaagggtcgtgaagtcggttccttcaatggt

SEQ ID NO: 2952 - DNA, 250 bp, synthetic construct
  source 1..250: mol_type = other DNA
gtatgtgcagctaactctcctcgccgcagccgaacgaccgagcgcagcgagtcagtgagcgaggaagcgtctagtgtcgctaaagtcatactctgacataatgcaaccataccttgacataattgcaaccattcactgacataaagccccttattaaaaatgatgctaaaaataaattccattagatatctcctgtcttctctgctacacatgaactcgcaagggtcgtgaagtcggttccttcaatggt

SEQ ID NO: 2953 - DNA, 250 bp, synthetic construct
  source 1..250: mol_type = other DNA
gtatgtgcagctaactctcctcgccgcagccgaacgaccgagcgcagcgagtcagtgagcgaggaagcgtctagtgtcgctaaagtcatactctgacataatgcaaccataccttgacataattgcaaccatacagtgacataaagccccttattaaaaatgatgctaaaaataaattccattagaatccattagtcttctctgctacacatgaactcgcaagggtcgtgaagtcggttccttcaatggt

SEQ ID NO: 2954 - DNA, 250 bp, synthetic construct
  source 1..250: mol_type = other DNA
gtatgtgcagctaactctcctcgccgcagccgaacgaccgagcgcagcgagtcagtgagcgaggaagcgtctagtgtcgctaaagtcatactctgacataataaagtcatactctgacataattgcaaccatagtttgacataaagccccttattaaaaatgatgctaaaaataaattccattagctacggttcgtcttctctgctacacatgaactcgcaagggtcgtgaagtcggttccttcaatggt

SEQ ID NO: 2955 - DNA, 250 bp, synthetic construct
  source 1..250: mol_type = other DNA
gtatgtgcagctaactctcctcgccgcagccgaacgaccgagcgcagcgagtcagtgagcgaggaagcgtctagtgtcgctaaagtcatactctgacataataaagtcatactctgacataattgcaaccataccttgacataaagccccttattaaaaatgatgctaaaaataaattccattagaaaggcctggtcttctctgctacacatgaactcgcaagggtcgtgaagtcggttccttcaatggt

SEQ ID NO: 2956 - DNA, 250 bp, synthetic construct
  source 1..250: mol_type = other DNA
gtatgtgcagctaactctcctcgccgcagccgaacgaccgagcgcagcgagtcagtgagcgaggaagcgtctagtgtcgctaaagtcatactctgacataataaagtcatactctgacataattaaagtcatactctgacataaagccccttattaaaaatgatgctaaaaataaattccattagctcagagtggtcttctctgctacacatgaactcgcaagggtcgtgaagtcggttccttcaatggt

SEQ ID NO: 2957 - DNA, 250 bp, synthetic construct
  source 1..250: mol_type = other DNA
gtatgtgcagctaactctcctcgccgcagccgaacgaccgagcgcagcgagtcagtgagcgaggaagcgtctagtgtcgctaaagtcatactctgacataataaagtcatactctgacataattgcaagcaaagcgtgacataaagccccttattaaaaatgatgctaaaaataaattccattatctttggcgtgtcttctctgctacacatgaactcgcaagggtcgtgaagtcggttccttcaatggt

SEQ ID NO: 2958 - DNA, 250 bp, synthetic construct
  source 1..250: mol_type = other DNA
gtatgtgcagctaactctcctcgccgcagccgaacgaccgagcgcagcgagtcagtgagcgaggaagcgtctagtgtcgctaaagtcatactctgacataataaagtcatactctgacataattgcaaccattcactgacataaagccccttattaaaaatgatgctaaaaataaattccattagctagtttgtgtcttctctgctacacatgaactcgcaagggtcgtgaagtcggttccttcaatggt

SEQ ID NO: 2959 - DNA, 250 bp, synthetic construct
  source 1..250: mol_type = other DNA
gtatgtgcagctaactctcctcgccgcagccgaacgaccgagcgcagcgagtcagtgagcgaggaagcgtctagtgtcgctaaagtcatactctgacataataaagtcatactctgacataattgcaaccatacagtgacataaagccccttattaaaaatgatgctaaaaataaattccattaggccctgaccgtcttctctgctacacatgaactcgcaagggtcgtgaagtcggttccttcaatggt

SEQ ID NO: 2960 - DNA, 250 bp, synthetic construct
  source 1..250: mol_type = other DNA
gtatgtgcagctaactctcctcgccgcagccgaacgaccgagcgcagcgagtcagtgagcgaggaagcgtctagtgtcgctaaagtcatactctgacataatgcaagcaaagcgtgacataattgcaaccatagtttgacataaagccccttattaaaaatgatgctaaaaataaattccattagcataagcgagtcttctctgctacacatgaactcgcaagggtcgtgaagtcggttccttcaatggt

SEQ ID NO: 2961 - DNA, 250 bp, synthetic construct
  source 1..250: mol_type = other DNA
gtatgtgcagctaactctcctcgccgcagccgaacgaccgagcgcagcgagtcagtgagcgaggaagcgtctagtgtcgctaaagtcatactctgacataatgcaagcaaagcgtgacataattgcaaccataccttgacataaagccccttattaaaaatgatgctaaaaataaattccattacgggatatttgtcttctctgctacacatgaactcgcaagggtcgtgaagtcggttccttcaatggt

SEQ ID NO: 2962 - DNA, 250 bp, synthetic construct
  source 1..250: mol_type = other DNA
gtatgtgcagctaactctcctcgccgcagccgaacgaccgagcgcagcgagtcagtgagcgaggaagcgtctagtgtcgctaaagtcatactctgacataatgcaagcaaagcgtgacataattaaagtcatactctgacataaagccccttattaaaaatgatgctaaaaataaattccattatcccgttcaggtcttctctgctacacatgaactcgcaagggtcgtgaagtcggttccttcaatggt

SEQ ID NO: 2963 - DNA, 250 bp, synthetic construct
  source 1..250: mol_type = other DNA
gtatgtgcagctaactctcctcgccgcagccgaacgaccgagcgcagcgagtcagtgagcgaggaagcgtctagtgtcgctaaagtcatactctgacataatgcaagcaaagcgtgacataattgcaagcaaagcgtgacataaagccccttattaaaaatgatgctaaaaataaattccattaactagcacgggtcttctctgctacacatgaactcgcaagggtcgtgaagtcggttccttcaatggt

SEQ ID NO: 2964 - DNA, 250 bp, synthetic construct
  source 1..250: mol_type = other DNA
gtatgtgcagctaactctcctcgccgcagccgaacgaccgagcgcagcgagtcagtgagcgaggaagcgtctagtgtcgctaaagtcatactctgacataatgcaagcaaagcgtgacataattgcaaccattcactgacataaagccccttattaaaaatgatgctaaaaataaattccattacggatgcagtgtcttctctgctacacatgaactcgcaagggtcgtgaagtcggttccttcaatggt

SEQ ID NO: 2965 - DNA, 250 bp, synthetic construct
  source 1..250: mol_type = other DNA
gtatgtgcagctaactctcctcgccgcagccgaacgaccgagcgcagcgagtcagtgagcgaggaagcgtctagtgtcgctaaagtcatactctgacataatgcaagcaaagcgtgacataattgcaaccatacagtgacataaagccccttattaaaaatgatgctaaaaataaattccattatgtagattgagtcttctctgctacacatgaactcgcaagggtcgtgaagtcggttccttcaatggt

SEQ ID NO: 2966 - DNA, 250 bp, synthetic construct
  source 1..250: mol_type = other DNA
gtatgtgcagctaactctcctcgccgcagccgaacgaccgagcgcagcgagtcagtgagcgaggaagcgtctagtgtcgctaaagtcatactctgacataatgcaaccattcactgacataattgcaaccatagtttgacataaagccccttattaaaaatgatgctaaaaataaattccattaatttttacgagtcttctctgctacacatgaactcgcaagggtcgtgaagtcggttccttcaatggt

SEQ ID NO: 2967 - DNA, 250 bp, synthetic construct
  source 1..250: mol_type = other DNA
gtatgtgcagctaactctcctcgccgcagccgaacgaccgagcgcagcgagtcagtgagcgaggaagcgtctagtgtcgctaaagtcatactctgacataatgcaaccattcactgacataattgcaaccataccttgacataaagccccttattaaaaatgatgctaaaaataaattccattatgtagggggtgtcttctctgctacacatgaactcgcaagggtcgtgaagtcggttccttcaatggt

SEQ ID NO: 2968 - DNA, 250 bp, synthetic construct
  source 1..250: mol_type = other DNA
gtatgtgcagctaactctcctcgccgcagccgaacgaccgagcgcagcgagtcagtgagcgaggaagcgtctagtgtcgctaaagtcatactctgacataatgcaaccattcactgacataattaaagtcatactctgacataaagccccttattaaaaatgatgctaaaaataaattccattaatgtaggtaagtcttctctgctacacatgaactcgcaagggtcgtgaagtcggttccttcaatggt

SEQ ID NO: 2969 - DNA, 250 bp, synthetic construct
  source 1..250: mol_type = other DNA
gtatgtgcagctaactctcctcgccgcagccgaacgaccgagcgcagcgagtcagtgagcgaggaagcgtctagtgtcgctaaagtcatactctgacataatgcaaccattcactgacataattgcaagcaaagcgtgacataaagccccttattaaaaatgatgctaaaaataaattccattatacctcccgggtcttctctgctacacatgaactcgcaagggtcgtgaagtcggttccttcaatggt

SEQ ID NO: 2970 - DNA, 250 bp, synthetic construct
  source 1..250: mol_type = other DNA
gtatgtgcagctaactctcctcgccgcagccgaacgaccgagcgcagcgagtcagtgagcgaggaagcgtctagtgtcgctaaagtcatactctgacataatgcaaccattcactgacataattgcaaccattcactgacataaagccccttattaaaaatgatgctaaaaataaattccattaccgtgcggcggtcttctctgctacacatgaactcgcaagggtcgtgaagtcggttccttcaatggt

SEQ ID NO: 2971 - DNA, 250 bp, synthetic construct
  source 1..250: mol_type = other DNA
gtatgtgcagctaactctcctcgccgcagccgaacgaccgagcgcagcgagtcagtgagcgaggaagcgtctagtgtcgctaaagtcatactctgacataatgcaaccattcactgacataattgcaaccatacagtgacataaagccccttattaaaaatgatgctaaaaataaattccattaagtgactcgggtcttctctgctacacatgaactcgcaagggtcgtgaagtcggttccttcaatggt

SEQ ID NO: 2972 - DNA, 250 bp, synthetic construct
  source 1..250: mol_type = other DNA
gtatgtgcagctaactctcctcgccgcagccgaacgaccgagcgcagcgagtcagtgagcgaggaagcgtctagtgtcgctaaagtcatactctgacataatgcaaccatacagtgacataattgcaaccatagtttgacataaagccccttattaaaaatgatgctaaaaataaattccattaggatatgcgcgtcttctctgctacacatgaactcgcaagggtcgtgaagtcggttccttcaatggt

SEQ ID NO: 2973 - DNA, 250 bp, synthetic construct
  source 1..250: mol_type = other DNA
gtatgtgcagctaactctcctcgccgcagccgaacgaccgagcgcagcgagtcagtgagcgaggaagcgtctagtgtcgctaaagtcatactctgacataatgcaaccatacagtgacataattgcaaccataccttgacataaagccccttattaaaaatgatgctaaaaataaattccattagacgaactgggtcttctctgctacacatgaactcgcaagggtcgtgaagtcggttccttcaatggt

SEQ ID NO: 2974 - DNA, 250 bp, synthetic construct
  source 1..250: mol_type = other DNA
gtatgtgcagctaactctcctcgccgcagccgaacgaccgagcgcagcgagtcagtgagcgaggaagcgtctagtgtcgctaaagtcatactctgacataatgcaaccatacagtgacataattaaagtcatactctgacataaagccccttattaaaaatgatgctaaaaataaattccattagaacgttaccgtcttctctgctacacatgaactcgcaagggtcgtgaagtcggttccttcaatggt

SEQ ID NO: 2975 - DNA, 250 bp, synthetic construct
  source 1..250: mol_type = other DNA
gtatgtgcagctaactctcctcgccgcagccgaacgaccgagcgcagcgagtcagtgagcgaggaagcgtctagtgtcgctaaagtcatactctgacataatgcaaccatacagtgacataattgcaagcaaagcgtgacataaagccccttattaaaaatgatgctaaaaataaattccattatttcgacacggtcttctctgctacacatgaactcgcaagggtcgtgaagtcggttccttcaatggt

SEQ ID NO: 2976 - DNA, 250 bp, synthetic construct
  source 1..250: mol_type = other DNA
gtatgtgcagctaactctcctcgccgcagccgaacgaccgagcgcagcgagtcagtgagcgaggaagcgtctagtgtcgctaaagtcatactctgacataatgcaaccatacagtgacataattgcaaccattcactgacataaagccccttattaaaaatgatgctaaaaataaattccattaggggaagcacgtcttctctgctacacatgaactcgcaagggtcgtgaagtcggttccttcaatggt

SEQ ID NO: 2977 - DNA, 250 bp, synthetic construct
  source 1..250: mol_type = other DNA
gtatgtgcagctaactctcctcgccgcagccgaacgaccgagcgcagcgagtcagtgagcgaggaagcgtctagtgtcgctaaagtcatactctgacataatgcaaccatacagtgacataattgcaaccatacagtgacataaagccccttattaaaaatgatgctaaaaataaattccattacagtgaataagtcttctctgctacacatgaactcgcaagggtcgtgaagtcggttccttcaatggt

SEQ ID NO: 2978 - DNA, 250 bp, synthetic construct
  source 1..250: mol_type = other DNA
gtatgtgcagctaactctcctcgccgcagccgaacgaccgagcgcagcgagtcagtgagcgaggaagcgtctagtgtcgctgcaagcaaagcgtgacataatgcaaccatagtttgacataattgcaaccatagtttgacataaagccccttattaaaaatgatgctaaaaataaattccattactttgaacgggtcttctctgctacacatgaactcgcaagggtcgtgaagtcggttccttcaatggt

SEQ ID NO: 2979 - DNA, 250 bp, synthetic construct
  source 1..250: mol_type = other DNA
gtatgtgcagctaactctcctcgccgcagccgaacgaccgagcgcagcgagtcagtgagcgaggaagcgtctagtgtcgctgcaagcaaagcgtgacataatgcaaccatagtttgacataattgcaaccataccttgacataaagccccttattaaaaatgatgctaaaaataaattccattacttgtggtgtgtcttctctgctacacatgaactcgcaagggtcgtgaagtcggttccttcaatggt

SEQ ID NO: 2980 - DNA, 250 bp, synthetic construct
  source 1..250: mol_type = other DNA
gtatgtgcagctaactctcctcgccgcagccgaacgaccgagcgcagcgagtcagtgagcgaggaagcgtctagtgtcgctgcaagcaaagcgtgacataatgcaaccatagtttgacataattaaagtcatactctgacataaagccccttattaaaaatgatgctaaaaataaattccattatgcatgcagagtcttctctgctacacatgaactcgcaagggtcgtgaagtcggttccttcaatggt

SEQ ID NO: 2981 - DNA, 250 bp, synthetic construct
  source 1..250: mol_type = other DNA
gtatgtgcagctaactctcctcgccgcagccgaacgaccgagcgcagcgagtcagtgagcgaggaagcgtctagtgtcgctgcaagcaaagcgtgacataatgcaaccatagtttgacataattgcaagcaaagcgtgacataaagccccttattaaaaatgatgctaaaaataaattccattatttggatcatgtcttctctgctacacatgaactcgcaagggtcgtgaagtcggttccttcaatggt

SEQ ID NO: 2982 - DNA, 250 bp, synthetic construct
  source 1..250: mol_type = other DNA
gtatgtgcagctaactctcctcgccgcagccgaacgaccgagcgcagcgagtcagtgagcgaggaagcgtctagtgtcgctgcaagcaaagcgtgacataatgcaaccatagtttgacataattgcaaccattcactgacataaagccccttattaaaaatgatgctaaaaataaattccattagctcgtgtgagtcttctctgctacacatgaactcgcaagggtcgtgaagtcggttccttcaatggt

SEQ ID NO: 2983 - DNA, 250 bp, synthetic construct
  source 1..250: mol_type = other DNA
gtatgtgcagctaactctcctcgccgcagccgaacgaccgagcgcagcgagtcagtgagcgaggaagcgtctagtgtcgctgcaagcaaagcgtgacataatgcaaccatagtttgacataattgcaaccatacagtgacataaagccccttattaaaaatgatgctaaaaataaattccattatttaaacgaagtcttctctgctacacatgaactcgcaagggtcgtgaagtcggttccttcaatggt

SEQ ID NO: 2984 - DNA, 250 bp, synthetic construct
  source 1..250: mol_type = other DNA
gtatgtgcagctaactctcctcgccgcagccgaacgaccgagcgcagcgagtcagtgagcgaggaagcgtctagtgtcgctgcaagcaaagcgtgacataatgcaaccataccttgacataattgcaaccatagtttgacataaagccccttattaaaaatgatgctaaaaataaattccattaacgaaacatagtcttctctgctacacatgaactcgcaagggtcgtgaagtcggttccttcaatggt

SEQ ID NO: 2985 - DNA, 250 bp, synthetic construct
  source 1..250: mol_type = other DNA
gtatgtgcagctaactctcctcgccgcagccgaacgaccgagcgcagcgagtcagtgagcgaggaagcgtctagtgtcgctgcaagcaaagcgtgacataatgcaaccataccttgacataattgcaaccataccttgacataaagccccttattaaaaatgatgctaaaaataaattccattaagagaccgaagtcttctctgctacacatgaactcgcaagggtcgtgaagtcggttccttcaatggt

SEQ ID NO: 2986 - DNA, 250 bp, synthetic construct
  source 1..250: mol_type = other DNA
gtatgtgcagctaactctcctcgccgcagccgaacgaccgagcgcagcgagtcagtgagcgaggaagcgtctagtgtcgctgcaagcaaagcgtgacataatgcaaccataccttgacataattaaagtcatactctgacataaagccccttattaaaaatgatgctaaaaataaattccattagcaacatatagtcttctctgctacacatgaactcgcaagggtcgtgaagtcggttccttcaatggt

SEQ ID NO: 2987 - DNA, 250 bp, synthetic construct
  source 1..250: mol_type = other DNA
gtatgtgcagctaactctcctcgccgcagccgaacgaccgagcgcagcgagtcagtgagcgaggaagcgtctagtgtcgctgcaagcaaagcgtgacataatgcaaccataccttgacataattgcaagcaaagcgtgacataaagccccttattaaaaatgatgctaaaaataaattccattagggctcccacgtcttctctgctacacatgaactcgcaagggtcgtgaagtcggttccttcaatggt

SEQ ID NO: 2988 - DNA, 250 bp, synthetic construct
  source 1..250: mol_type = other DNA
gtatgtgcagctaactctcctcgccgcagccgaacgaccgagcgcagcgagtcagtgagcgaggaagcgtctagtgtcgctgcaagcaaagcgtgacataatgcaaccataccttgacataattgcaaccattcactgacataaagccccttattaaaaatgatgctaaaaataaattccattatgtattggtggtcttctctgctacacatgaactcgcaagggtcgtgaagtcggttccttcaatggt

SEQ ID NO: 2989 - DNA, 250 bp, synthetic construct
  source 1..250: mol_type = other DNA
gtatgtgcagctaactctcctcgccgcagccgaacgaccgagcgcagcgagtcagtgagcgaggaagcgtctagtgtcgctgcaagcaaagcgtgacataatgcaaccataccttgacataattgcaaccatacagtgacataaagccccttattaaaaatgatgctaaaaataaattccattacaaggatacggtcttctctgctacacatgaactcgcaagggtcgtgaagtcggttccttcaatggt

SEQ ID NO: 2990 - DNA, 250 bp, synthetic construct
  source 1..250: mol_type = other DNA
gtatgtgcagctaactctcctcgccgcagccgaacgaccgagcgcagcgagtcagtgagcgaggaagcgtctagtgtcgctgcaagcaaagcgtgacataataaagtcatactctgacataattgcaaccatagtttgacataaagccccttattaaaaatgatgctaaaaataaattccattaacgtctcggagtcttctctgctacacatgaactcgcaagggtcgtgaagtcggttccttcaatggt

SEQ ID NO: 2991 - DNA, 250 bp, synthetic construct
  source 1..250: mol_type = other DNA
gtatgtgcagctaactctcctcgccgcagccgaacgaccgagcgcagcgagtcagtgagcgaggaagcgtctagtgtcgctgcaagcaaagcgtgacataataaagtcatactctgacataattgcaaccataccttgacataaagccccttattaaaaatgatgctaaaaataaattccattacaggtgcagcgtcttctctgctacacatgaactcgcaagggtcgtgaagtcggttccttcaatggt

SEQ ID NO: 2992 - DNA, 250 bp, synthetic construct
  source 1..250: mol_type = other DNA
gtatgtgcagctaactctcctcgccgcagccgaacgaccgagcgcagcgagtcagtgagcgaggaagcgtctagtgtcgctgcaagcaaagcgtgacataataaagtcatactctgacataattaaagtcatactctgacataaagccccttattaaaaatgatgctaaaaataaattccattatctgaggtgcgtcttctctgctacacatgaactcgcaagggtcgtgaagtcggttccttcaatggt

SEQ ID NO: 2993 - DNA, 250 bp, synthetic construct
  source 1..250: mol_type = other DNA
gtatgtgcagctaactctcctcgccgcagccgaacgaccgagcgcagcgagtcagtgagcgaggaagcgtctagtgtcgctgcaagcaaagcgtgacataataaagtcatactctgacataattgcaagcaaagcgtgacataaagccccttattaaaaatgatgctaaaaataaattccattacatgaaatgcgtcttctctgctacacatgaactcgcaagggtcgtgaagtcggttccttcaatggt

SEQ ID NO: 2994 - DNA, 250 bp, synthetic construct
  source 1..250: mol_type = other DNA
gtatgtgcagctaactctcctcgccgcagccgaacgaccgagcgcagcgagtcagtgagcgaggaagcgtctagtgtcgctgcaagcaaagcgtgacataataaagtcatactctgacataattgcaaccattcactgacataaagccccttattaaaaatgatgctaaaaataaattccattacttgccattcgtcttctctgctacacatgaactcgcaagggtcgtgaagtcggttccttcaatggt

SEQ ID NO: 2995 - DNA, 250 bp, synthetic construct
  source 1..250: mol_type = other DNA
gtatgtgcagctaactctcctcgccgcagccgaacgaccgagcgcagcgagtcagtgagcgaggaagcgtctagtgtcgctgcaagcaaagcgtgacataataaagtcatactctgacataattgcaaccatacagtgacataaagccccttattaaaaatgatgctaaaaataaattccattaagcgctcgtcgtcttctctgctacacatgaactcgcaagggtcgtgaagtcggttccttcaatggt

SEQ ID NO: 2996 - DNA, 250 bp, synthetic construct
  source 1..250: mol_type = other DNA
gtatgtgcagctaactctcctcgccgcagccgaacgaccgagcgcagcgagtcagtgagcgaggaagcgtctagtgtcgctgcaagcaaagcgtgacataatgcaagcaaagcgtgacataattgcaaccatagtttgacataaagccccttattaaaaatgatgctaaaaataaattccattaggtcatggcagtcttctctgctacacatgaactcgcaagggtcgtgaagtcggttccttcaatggt

SEQ ID NO: 2997 - DNA, 250 bp, synthetic construct
  source 1..250: mol_type = other DNA
gtatgtgcagctaactctcctcgccgcagccgaacgaccgagcgcagcgagtcagtgagcgaggaagcgtctagtgtcgctgcaagcaaagcgtgacataatgcaagcaaagcgtgacataattgcaaccataccttgacataaagccccttattaaaaatgatgctaaaaataaattccattagacctaaacggtcttctctgctacacatgaactcgcaagggtcgtgaagtcggttccttcaatggt

SEQ ID NO: 2998 - DNA, 250 bp, synthetic construct
  source 1..250: mol_type = other DNA
gtatgtgcagctaactctcctcgccgcagccgaacgaccgagcgcagcgagtcagtgagcgaggaagcgtctagtgtcgctgcaagcaaagcgtgacataatgcaagcaaagcgtgacataattaaagtcatactctgacataaagccccttattaaaaatgatgctaaaaataaattccattatagtatcactgtcttctctgctacacatgaactcgcaagggtcgtgaagtcggttccttcaatggt

SEQ ID NO: 2999 - DNA, 250 bp, synthetic construct
  source 1..250: mol_type = other DNA
gtatgtgcagctaactctcctcgccgcagccgaacgaccgagcgcagcgagtcagtgagcgaggaagcgtctagtgtcgctgcaagcaaagcgtgacataatgcaagcaaagcgtgacataattgcaagcaaagcgtgacataaagccccttattaaaaatgatgctaaaaataaattccattaggaatcttgtgtcttctctgctacacatgaactcgcaagggtcgtgaagtcggttccttcaatggt

SEQ ID NO: 3000 - DNA, 250 bp, synthetic construct
  source 1..250: mol_type = other DNA
gtatgtgcagctaactctcctcgccgcagccgaacgaccgagcgcagcgagtcagtgagcgaggaagcgtctagtgtcgctgcaagcaaagcgtgacataatgcaagcaaagcgtgacataattgcaaccattcactgacataaagccccttattaaaaatgatgctaaaaataaattccattaagatgaataggtcttctctgctacacatgaactcgcaagggtcgtgaagtcggttccttcaatggt

SEQ ID NO: 3001 - DNA, 250 bp, synthetic construct
  source 1..250: mol_type = other DNA
gtatgtgcagctaactctcctcgccgcagccgaacgaccgagcgcagcgagtcagtgagcgaggaagcgtctagtgtcgctgcaagcaaagcgtgacataatgcaagcaaagcgtgacataattgcaaccatacagtgacataaagccccttattaaaaatgatgctaaaaataaattccattacaaattacgggtcttctctgctacacatgaactcgcaagggtcgtgaagtcggttccttcaatggt

SEQ ID NO: 3002 - DNA, 250 bp, synthetic construct
  source 1..250: mol_type = other DNA
gtatgtgcagctaactctcctcgccgcagccgaacgaccgagcgcagcgagtcagtgagcgaggaagcgtctagtgtcgctgcaagcaaagcgtgacataatgcaaccattcactgacataattgcaaccatagtttgacataaagccccttattaaaaatgatgctaaaaataaattccattaccccttcacggtcttctctgctacacatgaactcgcaagggtcgtgaagtcggttccttcaatggt

SEQ ID NO: 3003 - DNA, 250 bp, synthetic construct
  source 1..250: mol_type = other DNA
gtatgtgcagctaactctcctcgccgcagccgaacgaccgagcgcagcgagtcagtgagcgaggaagcgtctagtgtcgctgcaagcaaagcgtgacataatgcaaccattcactgacataattgcaaccataccttgacataaagccccttattaaaaatgatgctaaaaataaattccattatgctgctctcgtcttctctgctacacatgaactcgcaagggtcgtgaagtcggttccttcaatggt

SEQ ID NO: 3004 - DNA, 250 bp, synthetic construct
  source 1..250: mol_type = other DNA
gtatgtgcagctaactctcctcgccgcagccgaacgaccgagcgcagcgagtcagtgagcgaggaagcgtctagtgtcgctgcaagcaaagcgtgacataatgcaaccattcactgacataattaaagtcatactctgacataaagccccttattaaaaatgatgctaaaaataaattccattagtgacaataggtcttctctgctacacatgaactcgcaagggtcgtgaagtcggttccttcaatggt

SEQ ID NO: 3005 - DNA, 250 bp, synthetic construct
  source 1..250: mol_type = other DNA
gtatgtgcagctaactctcctcgccgcagccgaacgaccgagcgcagcgagtcagtgagcgaggaagcgtctagtgtcgctgcaagcaaagcgtgacataatgcaaccattcactgacataattgcaagcaaagcgtgacataaagccccttattaaaaatgatgctaaaaataaattccattaggtcgctagtgtcttctctgctacacatgaactcgcaagggtcgtgaagtcggttccttcaatggt

SEQ ID NO: 3006 - DNA, 250 bp, synthetic construct
  source 1..250: mol_type = other DNA
gtatgtgcagctaactctcctcgccgcagccgaacgaccgagcgcagcgagtcagtgagcgaggaagcgtctagtgtcgctgcaagcaaagcgtgacataatgcaaccattcactgacataattgcaaccattcactgacataaagccccttattaaaaatgatgctaaaaataaattccattagcagacacatgtcttctctgctacacatgaactcgcaagggtcgtgaagtcggttccttcaatggt

SEQ ID NO: 3007 - DNA, 250 bp, synthetic construct
  source 1..250: mol_type = other DNA
gtatgtgcagctaactctcctcgccgcagccgaacgaccgagcgcagcgagtcagtgagcgaggaagcgtctagtgtcgctgcaagcaaagcgtgacataatgcaaccattcactgacataattgcaaccatacagtgacataaagccccttattaaaaatgatgctaaaaataaattccattagtgatgcagcgtcttctctgctacacatgaactcgcaagggtcgtgaagtcggttccttcaatggt

SEQ ID NO: 3008 - DNA, 250 bp, synthetic construct
  source 1..250: mol_type = other DNA
gtatgtgcagctaactctcctcgccgcagccgaacgaccgagcgcagcgagtcagtgagcgaggaagcgtctagtgtcgctgcaagcaaagcgtgacataatgcaaccatacagtgacataattgcaaccatagtttgacataaagccccttattaaaaatgatgctaaaaataaattccattagagttgcaaggtcttctctgctacacatgaactcgcaagggtcgtgaagtcggttccttcaatggt

SEQ ID NO: 3009 - DNA, 250 bp, synthetic construct
  source 1..250: mol_type = other DNA
gtatgtgcagctaactctcctcgccgcagccgaacgaccgagcgcagcgagtcagtgagcgaggaagcgtctagtgtcgctgcaagcaaagcgtgacataatgcaaccatacagtgacataattgcaaccataccttgacataaagccccttattaaaaatgatgctaaaaataaattccattaatcccttggcgtcttctctgctacacatgaactcgcaagggtcgtgaagtcggttccttcaatggt

SEQ ID NO: 3010 - DNA, 250 bp, synthetic construct
  source 1..250: mol_type = other DNA
gtatgtgcagctaactctcctcgccgcagccgaacgaccgagcgcagcgagtcagtgagcgaggaagcgtctagtgtcgctgcaagcaaagcgtgacataatgcaaccatacagtgacataattaaagtcatactctgacataaagccccttattaaaaatgatgctaaaaataaattccattaagaacctggggtcttctctgctacacatgaactcgcaagggtcgtgaagtcggttccttcaatggt

SEQ ID NO: 3011 - DNA, 250 bp, synthetic construct
  source 1..250: mol_type = other DNA
gtatgtgcagctaactctcctcgccgcagccgaacgaccgagcgcagcgagtcagtgagcgaggaagcgtctagtgtcgctgcaagcaaagcgtgacataatgcaaccatacagtgacataattgcaagcaaagcgtgacataaagccccttattaaaaatgatgctaaaaataaattccattagcccctagatgtcttctctgctacacatgaactcgcaagggtcgtgaagtcggttccttcaatggt

SEQ ID NO: 3012 - DNA, 250 bp, synthetic construct
  source 1..250: mol_type = other DNA
gtatgtgcagctaactctcctcgccgcagccgaacgaccgagcgcagcgagtcagtgagcgaggaagcgtctagtgtcgctgcaagcaaagcgtgacataatgcaaccatacagtgacataattgcaaccattcactgacataaagccccttattaaaaatgatgctaaaaataaattccattataactggcgggtcttctctgctacacatgaactcgcaagggtcgtgaagtcggttccttcaatggt

SEQ ID NO: 3013 - DNA, 250 bp, synthetic construct
  source 1..250: mol_type = other DNA
gtatgtgcagctaactctcctcgccgcagccgaacgaccgagcgcagcgagtcagtgagcgaggaagcgtctagtgtcgctgcaagcaaagcgtgacataatgcaaccatacagtgacataattgcaaccatacagtgacataaagccccttattaaaaatgatgctaaaaataaattccattataagctttgtgtcttctctgctacacatgaactcgcaagggtcgtgaagtcggttccttcaatggt

SEQ ID NO: 3014 - DNA, 250 bp, synthetic construct
  source 1..250: mol_type = other DNA
gtatgtgcagctaactctcctcgccgcagccgaacgaccgagcgcagcgagtcagtgagcgaggaagcgtctagtgtcgctgcaaccattcactgacataatgcaaccatagtttgacataattgcaaccatagtttgacataaagccccttattaaaaatgatgctaaaaataaattccattaattggttattgtcttctctgctacacatgaactcgcaagggtcgtgaagtcggttccttcaatggt

SEQ ID NO: 3015 - DNA, 250 bp, synthetic construct
  source 1..250: mol_type = other DNA
gtatgtgcagctaactctcctcgccgcagccgaacgaccgagcgcagcgagtcagtgagcgaggaagcgtctagtgtcgctgcaaccattcactgacataatgcaaccatagtttgacataattgcaaccataccttgacataaagccccttattaaaaatgatgctaaaaataaattccattagtctctacatgtcttctctgctacacatgaactcgcaagggtcgtgaagtcggttccttcaatggt

SEQ ID NO: 3016 - DNA, 250 bp, synthetic construct
  source 1..250: mol_type = other DNA
gtatgtgcagctaactctcctcgccgcagccgaacgaccgagcgcagcgagtcagtgagcgaggaagcgtctagtgtcgctgcaaccattcactgacataatgcaaccatagtttgacataattaaagtcatactctgacataaagccccttattaaaaatgatgctaaaaataaattccattagtgttgagctgtcttctctgctacacatgaactcgcaagggtcgtgaagtcggttccttcaatggt

SEQ ID NO: 3017 - DNA, 250 bp, synthetic construct
  source 1..250: mol_type = other DNA
gtatgtgcagctaactctcctcgccgcagccgaacgaccgagcgcagcgagtcagtgagcgaggaagcgtctagtgtcgctgcaaccattcactgacataatgcaaccatagtttgacataattgcaagcaaagcgtgacataaagccccttattaaaaatgatgctaaaaataaattccattagctcgttgcagtcttctctgctacacatgaactcgcaagggtcgtgaagtcggttccttcaatggt

SEQ ID NO: 3018 - DNA, 250 bp, synthetic construct
  source 1..250: mol_type = other DNA
gtatgtgcagctaactctcctcgccgcagccgaacgaccgagcgcagcgagtcagtgagcgaggaagcgtctagtgtcgctgcaaccattcactgacataatgcaaccatagtttgacataattgcaaccattcactgacataaagccccttattaaaaatgatgctaaaaataaattccattacgagggcagtgtcttctctgctacacatgaactcgcaagggtcgtgaagtcggttccttcaatggt

SEQ ID NO: 3019 - DNA, 250 bp, synthetic construct
  source 1..250: mol_type = other DNA
gtatgtgcagctaactctcctcgccgcagccgaacgaccgagcgcagcgagtcagtgagcgaggaagcgtctagtgtcgctgcaaccattcactgacataatgcaaccatagtttgacataattgcaaccatacagtgacataaagccccttattaaaaatgatgctaaaaataaattccattattgaggttaggtcttctctgctacacatgaactcgcaagggtcgtgaagtcggttccttcaatggt

SEQ ID NO: 3020 - DNA, 250 bp, synthetic construct
  source 1..250: mol_type = other DNA
gtatgtgcagctaactctcctcgccgcagccgaacgaccgagcgcagcgagtcagtgagcgaggaagcgtctagtgtcgctgcaaccattcactgacataatgcaaccataccttgacataattgcaaccatagtttgacataaagccccttattaaaaatgatgctaaaaataaattccattatatggatttcgtcttctctgctacacatgaactcgcaagggtcgtgaagtcggttccttcaatggt

SEQ ID NO: 3021 - DNA, 250 bp, synthetic construct
  source 1..250: mol_type = other DNA
gtatgtgcagctaactctcctcgccgcagccgaacgaccgagcgcagcgagtcagtgagcgaggaagcgtctagtgtcgctgcaaccattcactgacataatgcaaccataccttgacataattgcaaccataccttgacataaagccccttattaaaaatgatgctaaaaataaattccattaccggtagcgggtcttctctgctacacatgaactcgcaagggtcgtgaagtcggttccttcaatggt

SEQ ID NO: 3022 - DNA, 250 bp, synthetic construct
  source 1..250: mol_type = other DNA
gtatgtgcagctaactctcctcgccgcagccgaacgaccgagcgcagcgagtcagtgagcgaggaagcgtctagtgtcgctgcaaccattcactgacataatgcaaccataccttgacataattaaagtcatactctgacataaagccccttattaaaaatgatgctaaaaataaattccattagtcaagtctagtcttctctgctacacatgaactcgcaagggtcgtgaagtcggttccttcaatggt

SEQ ID NO: 3023 - DNA, 250 bp, synthetic construct
  source 1..250: mol_type = other DNA
gtatgtgcagctaactctcctcgccgcagccgaacgaccgagcgcagcgagtcagtgagcgaggaagcgtctagtgtcgctgcaaccattcactgacataatgcaaccataccttgacataattgcaagcaaagcgtgacataaagccccttattaaaaatgatgctaaaaataaattccattattcatgttgtgtcttctctgctacacatgaactcgcaagggtcgtgaagtcggttccttcaatggt

SEQ ID NO: 3024 - DNA, 250 bp, synthetic construct
  source 1..250: mol_type = other DNA
gtatgtgcagctaactctcctcgccgcagccgaacgaccgagcgcagcgagtcagtgagcgaggaagcgtctagtgtcgctgcaaccattcactgacataatgcaaccataccttgacataattgcaaccattcactgacataaagccccttattaaaaatgatgctaaaaataaattccattatacgtattgggtcttctctgctacacatgaactcgcaagggtcgtgaagtcggttccttcaatggt

SEQ ID NO: 3025 - DNA, 250 bp, synthetic construct
  source 1..250: mol_type = other DNA
gtatgtgcagctaactctcctcgccgcagccgaacgaccgagcgcagcgagtcagtgagcgaggaagcgtctagtgtcgctgcaaccattcactgacataatgcaaccataccttgacataattgcaaccatacagtgacataaagccccttattaaaaatgatgctaaaaataaattccattaggcatctattgtcttctctgctacacatgaactcgcaagggtcgtgaagtcggttccttcaatggt

SEQ ID NO: 3026 - DNA, 250 bp, synthetic construct
  source 1..250: mol_type = other DNA
gtatgtgcagctaactctcctcgccgcagccgaacgaccgagcgcagcgagtcagtgagcgaggaagcgtctagtgtcgctgcaaccattcactgacataataaagtcatactctgacataattgcaaccatagtttgacataaagccccttattaaaaatgatgctaaaaataaattccattaacagaaaccggtcttctctgctacacatgaactcgcaagggtcgtgaagtcggttccttcaatggt

SEQ ID NO: 3027 - DNA, 250 bp, synthetic construct
  source 1..250: mol_type = other DNA
gtatgtgcagctaactctcctcgccgcagccgaacgaccgagcgcagcgagtcagtgagcgaggaagcgtctagtgtcgctgcaaccattcactgacataataaagtcatactctgacataattgcaaccataccttgacataaagccccttattaaaaatgatgctaaaaataaattccattatacatgtttcgtcttctctgctacacatgaactcgcaagggtcgtgaagtcggttccttcaatggt

SEQ ID NO: 3028 - DNA, 250 bp, synthetic construct
  source 1..250: mol_type = other DNA
gtatgtgcagctaactctcctcgccgcagccgaacgaccgagcgcagcgagtcagtgagcgaggaagcgtctagtgtcgctgcaaccattcactgacataataaagtcatactctgacataattaaagtcatactctgacataaagccccttattaaaaatgatgctaaaaataaattccattagttacattccgtcttctctgctacacatgaactcgcaagggtcgtgaagtcggttccttcaatggt

SEQ ID NO: 3029 - DNA, 250 bp, synthetic construct
  source 1..250: mol_type = other DNA
gtatgtgcagctaactctcctcgccgcagccgaacgaccgagcgcagcgagtcagtgagcgaggaagcgtctagtgtcgctgcaaccattcactgacataataaagtcatactctgacataattgcaagcaaagcgtgacataaagccccttattaaaaatgatgctaaaaataaattccattaagccggtgctgtcttctctgctacacatgaactcgcaagggtcgtgaagtcggttccttcaatggt

SEQ ID NO: 3030 - DNA, 250 bp, synthetic construct
  source 1..250: mol_type = other DNA
gtatgtgcagctaactctcctcgccgcagccgaacgaccgagcgcagcgagtcagtgagcgaggaagcgtctagtgtcgctgcaaccattcactgacataataaagtcatactctgacataattgcaaccattcactgacataaagccccttattaaaaatgatgctaaaaataaattccattatcattcgctggtcttctctgctacacatgaactcgcaagggtcgtgaagtcggttccttcaatggt

SEQ ID NO: 3031 - DNA, 250 bp, synthetic construct
  source 1..250: mol_type = other DNA
gtatgtgcagctaactctcctcgccgcagccgaacgaccgagcgcagcgagtcagtgagcgaggaagcgtctagtgtcgctgcaaccattcactgacataataaagtcatactctgacataattgcaaccatacagtgacataaagccccttattaaaaatgatgctaaaaataaattccattacccccaacttgtcttctctgctacacatgaactcgcaagggtcgtgaagtcggttccttcaatggt

SEQ ID NO: 3032 - DNA, 250 bp, synthetic construct
  source 1..250: mol_type = other DNA
gtatgtgcagctaactctcctcgccgcagccgaacgaccgagcgcagcgagtcagtgagcgaggaagcgtctagtgtcgctgcaaccattcactgacataatgcaagcaaagcgtgacataattgcaaccatagtttgacataaagccccttattaaaaatgatgctaaaaataaattccattaggcctcccgagtcttctctgctacacatgaactcgcaagggtcgtgaagtcggttccttcaatggt

SEQ ID NO: 3033 - DNA, 250 bp, synthetic construct
  source 1..250: mol_type = other DNA
gtatgtgcagctaactctcctcgccgcagccgaacgaccgagcgcagcgagtcagtgagcgaggaagcgtctagtgtcgctgcaaccattcactgacataatgcaagcaaagcgtgacataattgcaaccataccttgacataaagccccttattaaaaatgatgctaaaaataaattccattatgatcttccggtcttctctgctacacatgaactcgcaagggtcgtgaagtcggttccttcaatggt

SEQ ID NO: 3034 - DNA, 250 bp, synthetic construct
  source 1..250: mol_type = other DNA
gtatgtgcagctaactctcctcgccgcagccgaacgaccgagcgcagcgagtcagtgagcgaggaagcgtctagtgtcgctgcaaccattcactgacataatgcaagcaaagcgtgacataattaaagtcatactctgacataaagccccttattaaaaatgatgctaaaaataaattccattagttcgctgacgtcttctctgctacacatgaactcgcaagggtcgtgaagtcggttccttcaatggt

SEQ ID NO: 3035 - DNA, 250 bp, synthetic construct
  source 1..250: mol_type = other DNA
gtatgtgcagctaactctcctcgccgcagccgaacgaccgagcgcagcgagtcagtgagcgaggaagcgtctagtgtcgctgcaaccattcactgacataatgcaagcaaagcgtgacataattgcaagcaaagcgtgacataaagccccttattaaaaatgatgctaaaaataaattccattacggtaggttagtcttctctgctacacatgaactcgcaagggtcgtgaagtcggttccttcaatggt

SEQ ID NO: 3036 - DNA, 250 bp, synthetic construct
  source 1..250: mol_type = other DNA
gtatgtgcagctaactctcctcgccgcagccgaacgaccgagcgcagcgagtcagtgagcgaggaagcgtctagtgtcgctgcaaccattcactgacataatgcaagcaaagcgtgacataattgcaaccattcactgacataaagccccttattaaaaatgatgctaaaaataaattccattactggtcccgtgtcttctctgctacacatgaactcgcaagggtcgtgaagtcggttccttcaatggt

SEQ ID NO: 3037 - DNA, 250 bp, synthetic construct
  source 1..250: mol_type = other DNA
gtatgtgcagctaactctcctcgccgcagccgaacgaccgagcgcagcgagtcagtgagcgaggaagcgtctagtgtcgctgcaaccattcactgacataatgcaagcaaagcgtgacataattgcaaccatacagtgacataaagccccttattaaaaatgatgctaaaaataaattccattacgtctactttgtcttctctgctacacatgaactcgcaagggtcgtgaagtcggttccttcaatggt

SEQ ID NO: 3038 - DNA, 250 bp, synthetic construct
  source 1..250: mol_type = other DNA
gtatgtgcagctaactctcctcgccgcagccgaacgaccgagcgcagcgagtcagtgagcgaggaagcgtctagtgtcgctgcaaccattcactgacataatgcaaccattcactgacataattgcaaccatagtttgacataaagccccttattaaaaatgatgctaaaaataaattccattagataccccttgtcttctctgctacacatgaactcgcaagggtcgtgaagtcggttccttcaatggt

SEQ ID NO: 3039 - DNA, 250 bp, synthetic construct
  source 1..250: mol_type = other DNA
gtatgtgcagctaactctcctcgccgcagccgaacgaccgagcgcagcgagtcagtgagcgaggaagcgtctagtgtcgctgcaaccattcactgacataatgcaaccattcactgacataattgcaaccataccttgacataaagccccttattaaaaatgatgctaaaaataaattccattacttcaggaaggtcttctctgctacacatgaactcgcaagggtcgtgaagtcggttccttcaatggt

SEQ ID NO: 3040 - DNA, 250 bp, synthetic construct
  source 1..250: mol_type = other DNA
gtatgtgcagctaactctcctcgccgcagccgaacgaccgagcgcagcgagtcagtgagcgaggaagcgtctagtgtcgctgcaaccattcactgacataatgcaaccattcactgacataattaaagtcatactctgacataaagccccttattaaaaatgatgctaaaaataaattccattattttgttactgtcttctctgctacacatgaactcgcaagggtcgtgaagtcggttccttcaatggt

SEQ ID NO: 3041 - DNA, 250 bp, synthetic construct
  source 1..250: mol_type = other DNA
gtatgtgcagctaactctcctcgccgcagccgaacgaccgagcgcagcgagtcagtgagcgaggaagcgtctagtgtcgctgcaaccattcactgacataatgcaaccattcactgacataattgcaagcaaagcgtgacataaagccccttattaaaaatgatgctaaaaataaattccattacctctagtgcgtcttctctgctacacatgaactcgcaagggtcgtgaagtcggttccttcaatggt

SEQ ID NO: 3042 - DNA, 250 bp, synthetic construct
  source 1..250: mol_type = other DNA
gtatgtgcagctaactctcctcgccgcagccgaacgaccgagcgcagcgagtcagtgagcgaggaagcgtctagtgtcgctgcaaccattcactgacataatgcaaccattcactgacataattgcaaccattcactgacataaagccccttattaaaaatgatgctaaaaataaattccattacgtgccttacgtcttctctgctacacatgaactcgcaagggtcgtgaagtcggttccttcaatggt

SEQ ID NO: 3043 - DNA, 250 bp, synthetic construct
  source 1..250: mol_type = other DNA
gtatgtgcagctaactctcctcgccgcagccgaacgaccgagcgcagcgagtcagtgagcgaggaagcgtctagtgtcgctgcaaccattcactgacataatgcaaccattcactgacataattgcaaccatacagtgacataaagccccttattaaaaatgatgctaaaaataaattccattacctatcctgtgtcttctctgctacacatgaactcgcaagggtcgtgaagtcggttccttcaatggt

SEQ ID NO: 3044 - DNA, 250 bp, synthetic construct
  source 1..250: mol_type = other DNA
gtatgtgcagctaactctcctcgccgcagccgaacgaccgagcgcagcgagtcagtgagcgaggaagcgtctagtgtcgctgcaaccattcactgacataatgcaaccatacagtgacataattgcaaccatagtttgacataaagccccttattaaaaatgatgctaaaaataaattccattaaccgactttcgtcttctctgctacacatgaactcgcaagggtcgtgaagtcggttccttcaatggt

SEQ ID NO: 3045 - DNA, 250 bp, synthetic construct
  source 1..250: mol_type = other DNA
gtatgtgcagctaactctcctcgccgcagccgaacgaccgagcgcagcgagtcagtgagcgaggaagcgtctagtgtcgctgcaaccattcactgacataatgcaaccatacagtgacataattgcaaccataccttgacataaagccccttattaaaaatgatgctaaaaataaattccattataaggtagttgtcttctctgctacacatgaactcgcaagggtcgtgaagtcggttccttcaatggt

SEQ ID NO: 3046 - DNA, 250 bp, synthetic construct
  source 1..250: mol_type = other DNA
gtatgtgcagctaactctcctcgccgcagccgaacgaccgagcgcagcgagtcagtgagcgaggaagcgtctagtgtcgctgcaaccattcactgacataatgcaaccatacagtgacataattaaagtcatactctgacataaagccccttattaaaaatgatgctaaaaataaattccattagtaaagaatcgtcttctctgctacacatgaactcgcaagggtcgtgaagtcggttccttcaatggt

SEQ ID NO: 3047 - DNA, 250 bp, synthetic construct
  source 1..250: mol_type = other DNA
gtatgtgcagctaactctcctcgccgcagccgaacgaccgagcgcagcgagtcagtgagcgaggaagcgtctagtgtcgctgcaaccattcactgacataatgcaaccatacagtgacataattgcaagcaaagcgtgacataaagccccttattaaaaatgatgctaaaaataaattccattagcagtagagcgtcttctctgctacacatgaactcgcaagggtcgtgaagtcggttccttcaatggt

SEQ ID NO: 3048 - DNA, 250 bp, synthetic construct
  source 1..250: mol_type = other DNA
gtatgtgcagctaactctcctcgccgcagccgaacgaccgagcgcagcgagtcagtgagcgaggaagcgtctagtgtcgctgcaaccattcactgacataatgcaaccatacagtgacataattgcaaccattcactgacataaagccccttattaaaaatgatgctaaaaataaattccattaaagtccgacggtcttctctgctacacatgaactcgcaagggtcgtgaagtcggttccttcaatggt

SEQ ID NO: 3049 - DNA, 250 bp, synthetic construct
  source 1..250: mol_type = other DNA
gtatgtgcagctaactctcctcgccgcagccgaacgaccgagcgcagcgagtcagtgagcgaggaagcgtctagtgtcgctgcaaccattcactgacataatgcaaccatacagtgacataattgcaaccatacagtgacataaagccccttattaaaaatgatgctaaaaataaattccattattctgagaaagtcttctctgctacacatgaactcgcaagggtcgtgaagtcggttccttcaatggt

SEQ ID NO: 3050 - DNA, 250 bp, synthetic construct
  source 1..250: mol_type = other DNA
gtatgtgcagctaactctcctcgccgcagccgaacgaccgagcgcagcgagtcagtgagcgaggaagcgtctagtgtcgctgcaaccatacagtgacataatgcaaccatagtttgacataattgcaaccatagtttgacataaagccccttattaaaaatgatgctaaaaataaattccattatgtataaaccgtcttctctgctacacatgaactcgcaagggtcgtgaagtcggttccttcaatggt

SEQ ID NO: 3051 - DNA, 250 bp, synthetic construct
  source 1..250: mol_type = other DNA
gtatgtgcagctaactctcctcgccgcagccgaacgaccgagcgcagcgagtcagtgagcgaggaagcgtctagtgtcgctgcaaccatacagtgacataatgcaaccatagtttgacataattgcaaccataccttgacataaagccccttattaaaaatgatgctaaaaataaattccattaaaatacagcggtcttctctgctacacatgaactcgcaagggtcgtgaagtcggttccttcaatggt

SEQ ID NO: 3052 - DNA, 250 bp, synthetic construct
  source 1..250: mol_type = other DNA
gtatgtgcagctaactctcctcgccgcagccgaacgaccgagcgcagcgagtcagtgagcgaggaagcgtctagtgtcgctgcaaccatacagtgacataatgcaaccatagtttgacataattaaagtcatactctgacataaagccccttattaaaaatgatgctaaaaataaattccattaccggttctcagtcttctctgctacacatgaactcgcaagggtcgtgaagtcggttccttcaatggt

SEQ ID NO: 3053 - DNA, 250 bp, synthetic construct
  source 1..250: mol_type = other DNA
gtatgtgcagctaactctcctcgccgcagccgaacgaccgagcgcagcgagtcagtgagcgaggaagcgtctagtgtcgctgcaaccatacagtgacataatgcaaccatagtttgacataattgcaagcaaagcgtgacataaagccccttattaaaaatgatgctaaaaataaattccattaggcttgacaggtcttctctgctacacatgaactcgcaagggtcgtgaagtcggttccttcaatggt

SEQ ID NO: 3054 - DNA, 250 bp, synthetic construct
  source 1..250: mol_type = other DNA
gtatgtgcagctaactctcctcgccgcagccgaacgaccgagcgcagcgagtcagtgagcgaggaagcgtctagtgtcgctgcaaccatacagtgacataatgcaaccatagtttgacataattgcaaccattcactgacataaagccccttattaaaaatgatgctaaaaataaattccattaagaagccactgtcttctctgctacacatgaactcgcaagggtcgtgaagtcggttccttcaatggt

SEQ ID NO: 3055 - DNA, 250 bp, synthetic construct
  source 1..250: mol_type = other DNA
gtatgtgcagctaactctcctcgccgcagccgaacgaccgagcgcagcgagtcagtgagcgaggaagcgtctagtgtcgctgcaaccatacagtgacataatgcaaccatagtttgacataattgcaaccatacagtgacataaagccccttattaaaaatgatgctaaaaataaattccattacaccggctaggtcttctctgctacacatgaactcgcaagggtcgtgaagtcggttccttcaatggt

SEQ ID NO: 3056 - DNA, 250 bp, synthetic construct
  source 1..250: mol_type = other DNA
gtatgtgcagctaactctcctcgccgcagccgaacgaccgagcgcagcgagtcagtgagcgaggaagcgtctagtgtcgctgcaaccatacagtgacataatgcaaccataccttgacataattgcaaccatagtttgacataaagccccttattaaaaatgatgctaaaaataaattccattaggtacggcttgtcttctctgctacacatgaactcgcaagggtcgtgaagtcggttccttcaatggt

SEQ ID NO: 3057 - DNA, 250 bp, synthetic construct
  source 1..250: mol_type = other DNA
gtatgtgcagctaactctcctcgccgcagccgaacgaccgagcgcagcgagtcagtgagcgaggaagcgtctagtgtcgctgcaaccatacagtgacataatgcaaccataccttgacataattgcaaccataccttgacataaagccccttattaaaaatgatgctaaaaataaattccattaaactttattcgtcttctctgctacacatgaactcgcaagggtcgtgaagtcggttccttcaatggt

SEQ ID NO: 3058 - DNA, 250 bp, synthetic construct
  source 1..250: mol_type = other DNA
gtatgtgcagctaactctcctcgccgcagccgaacgaccgagcgcagcgagtcagtgagcgaggaagcgtctagtgtcgctgcaaccatacagtgacataatgcaaccataccttgacataattaaagtcatactctgacataaagccccttattaaaaatgatgctaaaaataaattccattaattctcctgtgtcttctctgctacacatgaactcgcaagggtcgtgaagtcggttccttcaatggt

SEQ ID NO: 3059 - DNA, 250 bp, synthetic construct
  source 1..250: mol_type = other DNA
gtatgtgcagctaactctcctcgccgcagccgaacgaccgagcgcagcgagtcagtgagcgaggaagcgtctagtgtcgctgcaaccatacagtgacataatgcaaccataccttgacataattgcaagcaaagcgtgacataaagccccttattaaaaatgatgctaaaaataaattccattatgcgattcaggtcttctctgctacacatgaactcgcaagggtcgtgaagtcggttccttcaatggt

SEQ ID NO: 3060 - DNA, 250 bp, synthetic construct
  source 1..250: mol_type = other DNA
gtatgtgcagctaactctcctcgccgcagccgaacgaccgagcgcagcgagtcagtgagcgaggaagcgtctagtgtcgctgcaaccatacagtgacataatgcaaccataccttgacataattgcaaccattcactgacataaagccccttattaaaaatgatgctaaaaataaattccattaccgcgtctctgtcttctctgctacacatgaactcgcaagggtcgtgaagtcggttccttcaatggt

SEQ ID NO: 3061 - DNA, 250 bp, synthetic construct
  source 1..250: mol_type = other DNA
gtatgtgcagctaactctcctcgccgcagccgaacgaccgagcgcagcgagtcagtgagcgaggaagcgtctagtgtcgctgcaaccatacagtgacataatgcaaccataccttgacataattgcaaccatacagtgacataaagccccttattaaaaatgatgctaaaaataaattccattatcgaacatgggtcttctctgctacacatgaactcgcaagggtcgtgaagtcggttccttcaatggt

SEQ ID NO: 3062 - DNA, 250 bp, synthetic construct
  source 1..250: mol_type = other DNA
gtatgtgcagctaactctcctcgccgcagccgaacgaccgagcgcagcgagtcagtgagcgaggaagcgtctagtgtcgctgcaaccatacagtgacataataaagtcatactctgacataattgcaaccatagtttgacataaagccccttattaaaaatgatgctaaaaataaattccattatttcttcctcgtcttctctgctacacatgaactcgcaagggtcgtgaagtcggttccttcaatggt

SEQ ID NO: 3063 - DNA, 250 bp, synthetic construct
  source 1..250: mol_type = other DNA
gtatgtgcagctaactctcctcgccgcagccgaacgaccgagcgcagcgagtcagtgagcgaggaagcgtctagtgtcgctgcaaccatacagtgacataataaagtcatactctgacataattgcaaccataccttgacataaagccccttattaaaaatgatgctaaaaataaattccattaatctgtccacgtcttctctgctacacatgaactcgcaagggtcgtgaagtcggttccttcaatggt

SEQ ID NO: 3064 - DNA, 250 bp, synthetic construct
  source 1..250: mol_type = other DNA
gtatgtgcagctaactctcctcgccgcagccgaacgaccgagcgcagcgagtcagtgagcgaggaagcgtctagtgtcgctgcaaccatacagtgacataataaagtcatactctgacataattaaagtcatactctgacataaagccccttattaaaaatgatgctaaaaataaattccattacagactatgggtcttctctgctacacatgaactcgcaagggtcgtgaagtcggttccttcaatggt

SEQ ID NO: 3065 - DNA, 250 bp, synthetic construct
  source 1..250: mol_type = other DNA
gtatgtgcagctaactctcctcgccgcagccgaacgaccgagcgcagcgagtcagtgagcgaggaagcgtctagtgtcgctgcaaccatacagtgacataataaagtcatactctgacataattgcaagcaaagcgtgacataaagccccttattaaaaatgatgctaaaaataaattccattacaggttaggtgtcttctctgctacacatgaactcgcaagggtcgtgaagtcggttccttcaatggt

SEQ ID NO: 3066 - DNA, 250 bp, synthetic construct
  source 1..250: mol_type = other DNA
gtatgtgcagctaactctcctcgccgcagccgaacgaccgagcgcagcgagtcagtgagcgaggaagcgtctagtgtcgctgcaaccatacagtgacataataaagtcatactctgacataattgcaaccattcactgacataaagccccttattaaaaatgatgctaaaaataaattccattaaaggccggcagtcttctctgctacacatgaactcgcaagggtcgtgaagtcggttccttcaatggt

SEQ ID NO: 3067 - DNA, 250 bp, synthetic construct
  source 1..250: mol_type = other DNA
gtatgtgcagctaactctcctcgccgcagccgaacgaccgagcgcagcgagtcagtgagcgaggaagcgtctagtgtcgctgcaaccatacagtgacataataaagtcatactctgacataattgcaaccatacagtgacataaagccccttattaaaaatgatgctaaaaataaattccattattgaaaattagtcttctctgctacacatgaactcgcaagggtcgtgaagtcggttccttcaatggt

SEQ ID NO: 3068 - DNA, 250 bp, synthetic construct
  source 1..250: mol_type = other DNA
gtatgtgcagctaactctcctcgccgcagccgaacgaccgagcgcagcgagtcagtgagcgaggaagcgtctagtgtcgctgcaaccatacagtgacataatgcaagcaaagcgtgacataattgcaaccatagtttgacataaagccccttattaaaaatgatgctaaaaataaattccattaggtttacttcgtcttctctgctacacatgaactcgcaagggtcgtgaagtcggttccttcaatggt

SEQ ID NO: 3069 - DNA, 250 bp, synthetic construct
  source 1..250: mol_type = other DNA
gtatgtgcagctaactctcctcgccgcagccgaacgaccgagcgcagcgagtcagtgagcgaggaagcgtctagtgtcgctgcaaccatacagtgacataatgcaagcaaagcgtgacataattgcaaccataccttgacataaagccccttattaaaaatgatgctaaaaataaattccattatgtaacagacgtcttctctgctacacatgaactcgcaagggtcgtgaagtcggttccttcaatggt

SEQ ID NO: 3070 - DNA, 250 bp, synthetic construct
  source 1..250: mol_type = other DNA
gtatgtgcagctaactctcctcgccgcagccgaacgaccgagcgcagcgagtcagtgagcgaggaagcgtctagtgtcgctgcaaccatacagtgacataatgcaagcaaagcgtgacataattaaagtcatactctgacataaagccccttattaaaaatgatgctaaaaataaattccattaaaccgtttcggtcttctctgctacacatgaactcgcaagggtcgtgaagtcggttccttcaatggt

SEQ ID NO: 3071 - DNA, 250 bp, synthetic construct
  source 1..250: mol_type = other DNA
gtatgtgcagctaactctcctcgccgcagccgaacgaccgagcgcagcgagtcagtgagcgaggaagcgtctagtgtcgctgcaaccatacagtgacataatgcaagcaaagcgtgacataattgcaagcaaagcgtgacataaagccccttattaaaaatgatgctaaaaataaattccattaagtaggtacggtcttctctgctacacatgaactcgcaagggtcgtgaagtcggttccttcaatggt

SEQ ID NO: 3072 - DNA, 250 bp, synthetic construct
  source 1..250: mol_type = other DNA
gtatgtgcagctaactctcctcgccgcagccgaacgaccgagcgcagcgagtcagtgagcgaggaagcgtctagtgtcgctgcaaccatacagtgacataatgcaagcaaagcgtgacataattgcaaccattcactgacataaagccccttattaaaaatgatgctaaaaataaattccattagtagattgaggtcttctctgctacacatgaactcgcaagggtcgtgaagtcggttccttcaatggt

SEQ ID NO: 3073 - DNA, 250 bp, synthetic construct
  source 1..250: mol_type = other DNA
gtatgtgcagctaactctcctcgccgcagccgaacgaccgagcgcagcgagtcagtgagcgaggaagcgtctagtgtcgctgcaaccatacagtgacataatgcaagcaaagcgtgacataattgcaaccatacagtgacataaagccccttattaaaaatgatgctaaaaataaattccattagccgcgagtagtcttctctgctacacatgaactcgcaagggtcgtgaagtcggttccttcaatggt

SEQ ID NO: 3074 - DNA, 250 bp, synthetic construct
  source 1..250: mol_type = other DNA
gtatgtgcagctaactctcctcgccgcagccgaacgaccgagcgcagcgagtcagtgagcgaggaagcgtctagtgtcgctgcaaccatacagtgacataatgcaaccattcactgacataattgcaaccatagtttgacataaagccccttattaaaaatgatgctaaaaataaattccattactttcacgaggtcttctctgctacacatgaactcgcaagggtcgtgaagtcggttccttcaatggt

SEQ ID NO: 3075 - DNA, 250 bp, synthetic construct
  source 1..250: mol_type = other DNA
gtatgtgcagctaactctcctcgccgcagccgaacgaccgagcgcagcgagtcagtgagcgaggaagcgtctagtgtcgctgcaaccatacagtgacataatgcaaccattcactgacataattgcaaccataccttgacataaagccccttattaaaaatgatgctaaaaataaattccattatagtgcaatggtcttctctgctacacatgaactcgcaagggtcgtgaagtcggttccttcaatggt

SEQ ID NO: 3076 - DNA, 250 bp, synthetic construct
  source 1..250: mol_type = other DNA
gtatgtgcagctaactctcctcgccgcagccgaacgaccgagcgcagcgagtcagtgagcgaggaagcgtctagtgtcgctgcaaccatacagtgacataatgcaaccattcactgacataattaaagtcatactctgacataaagccccttattaaaaatgatgctaaaaataaattccattaaaccagtcaggtcttctctgctacacatgaactcgcaagggtcgtgaagtcggttccttcaatggt

SEQ ID NO: 3077 - DNA, 250 bp, synthetic construct
  source 1..250: mol_type = other DNA
gtatgtgcagctaactctcctcgccgcagccgaacgaccgagcgcagcgagtcagtgagcgaggaagcgtctagtgtcgctgcaaccatacagtgacataatgcaaccattcactgacataattgcaagcaaagcgtgacataaagccccttattaaaaatgatgctaaaaataaattccattacgctatgattgtcttctctgctacacatgaactcgcaagggtcgtgaagtcggttccttcaatggt

SEQ ID NO: 3078 - DNA, 250 bp, synthetic construct
  source 1..250: mol_type = other DNA
gtatgtgcagctaactctcctcgccgcagccgaacgaccgagcgcagcgagtcagtgagcgaggaagcgtctagtgtcgctgcaaccatacagtgacataatgcaaccattcactgacataattgcaaccattcactgacataaagccccttattaaaaatgatgctaaaaataaattccattatactcttcttgtcttctctgctacacatgaactcgcaagggtcgtgaagtcggttccttcaatggt

SEQ ID NO: 3079 - DNA, 250 bp, synthetic construct
  source 1..250: mol_type = other DNA
gtatgtgcagctaactctcctcgccgcagccgaacgaccgagcgcagcgagtcagtgagcgaggaagcgtctagtgtcgctgcaaccatacagtgacataatgcaaccattcactgacataattgcaaccatacagtgacataaagccccttattaaaaatgatgctaaaaataaattccattaacctgggtttgtcttctctgctacacatgaactcgcaagggtcgtgaagtcggttccttcaatggt

SEQ ID NO: 3080 - DNA, 250 bp, synthetic construct
  source 1..250: mol_type = other DNA
gtatgtgcagctaactctcctcgccgcagccgaacgaccgagcgcagcgagtcagtgagcgaggaagcgtctagtgtcgctgcaaccatacagtgacataatgcaaccatacagtgacataattgcaaccatagtttgacataaagccccttattaaaaatgatgctaaaaataaattccattacgagggagtcgtcttctctgctacacatgaactcgcaagggtcgtgaagtcggttccttcaatggt

SEQ ID NO: 3081 - DNA, 250 bp, synthetic construct
  source 1..250: mol_type = other DNA
gtatgtgcagctaactctcctcgccgcagccgaacgaccgagcgcagcgagtcagtgagcgaggaagcgtctagtgtcgctgcaaccatacagtgacataatgcaaccatacagtgacataattgcaaccataccttgacataaagccccttattaaaaatgatgctaaaaataaattccattatacctctgcggtcttctctgctacacatgaactcgcaagggtcgtgaagtcggttccttcaatggt

SEQ ID NO: 3082 - DNA, 250 bp, synthetic construct
  source 1..250: mol_type = other DNA
gtatgtgcagctaactctcctcgccgcagccgaacgaccgagcgcagcgagtcagtgagcgaggaagcgtctagtgtcgctgcaaccatacagtgacataatgcaaccatacagtgacataattaaagtcatactctgacataaagccccttattaaaaatgatgctaaaaataaattccattagcggtcgcatgtcttctctgctacacatgaactcgcaagggtcgtgaagtcggttccttcaatggt

SEQ ID NO: 3083 - DNA, 250 bp, synthetic construct
  source 1..250: mol_type = other DNA
gtatgtgcagctaactctcctcgccgcagccgaacgaccgagcgcagcgagtcagtgagcgaggaagcgtctagtgtcgctgcaaccatacagtgacataatgcaaccatacagtgacataattgcaagcaaagcgtgacataaagccccttattaaaaatgatgctaaaaataaattccattatacgctcctcgtcttctctgctacacatgaactcgcaagggtcgtgaagtcggttccttcaatggt

SEQ ID NO: 3084 - DNA, 250 bp, synthetic construct
  source 1..250: mol_type = other DNA
gtatgtgcagctaactctcctcgccgcagccgaacgaccgagcgcagcgagtcagtgagcgaggaagcgtctagtgtcgctgcaaccatacagtgacataatgcaaccatacagtgacataattgcaaccattcactgacataaagccccttattaaaaatgatgctaaaaataaattccattaggataacggggtcttctctgctacacatgaactcgcaagggtcgtgaagtcggttccttcaatggt

SEQ ID NO: 3085 - DNA, 250 bp, synthetic construct
  source 1..250: mol_type = other DNA
gtatgtgcagctaactctcctcgccgcagccgaacgaccgagcgcagcgagtcagtgagcgaggaagcgtctagtgtcgctgcaaccatacagtgacataatgcaaccatacagtgacataattgcaaccatacagtgacataaagccccttattaaaaatgatgctaaaaataaattccattagttcctcaatgtcttctctgctacacatgaactcgcaagggtcgtgaagtcggttccttcaatggt

SEQ ID NO: 3086 - DNA, 250 bp, synthetic construct
  source 1..250: mol_type = other DNA
gtatgtgcagctaactctcctcgccgcagccgaacgaccgagcgcagcgagtcagtgagcgaggaagcgtctagtgtcgctgcaaccatagtttgacataatgcaaccataccttgacataatgtaccaacgctgggtcacgcaagccccttattaaaaatgatgctaaaaataaattccattaggtggtaaatgtcttctctgctacacatgaactcgcaagggtcgtgaagtcggttccttcaatggt

SEQ ID NO: 3087 - DNA, 250 bp, synthetic construct
  source 1..250: mol_type = other DNA
gtatgtgcagctaactctcctcgccgcagccgaacgaccgagcgcagcgagtcagtgagcgaggaagcgtctagtgtcgctgcaaccatagtttgacataagtaccaacgctgggtcacgcattaaagtcatactctgacataaagccccttattaaaaatgatgctaaaaataaattccattagagctgcatcgtcttctctgctacacatgaactcgcaagggtcgtgaagtcggttccttcaatggt

SEQ ID NO: 3088 - DNA, 250 bp, synthetic construct
  source 1..250: mol_type = other DNA
gtatgtgcagctaactctcctcgccgcagccgaacgaccgagcgcagcgagtcagtgagcgaggaagcgtctagtgtcgcgtaccaacgctgggtcacgcatgcaaccataccttgacataattaaagtcatactctgacataaagccccttattaaaaatgatgctaaaaataaattccattacggccatcaggtcttctctgctacacatgaactcgcaagggtcgtgaagtcggttccttcaatggt

SEQ ID NO: 3089 - DNA, 250 bp, synthetic construct
  source 1..250: mol_type = other DNA
gtatgtgcagctaactctcctcgccgcagccgaacgaccgagcgcagcgagtcagtgagcgaggaagcgtctagtgtcgctgcaaccatagtttgacataatgcaaccataccttgacataattaaagtcatactctgacataaagccccttattaaaaatgatgctaaaaataaattccattagctttgtaccgtcttctctgctacacatgaactcgcaagggtcgtgaagtcggttccttcaatggt

SEQ ID NO: 3090 - DNA, 250 bp, synthetic construct
  source 1..250: mol_type = other DNA
gtatgtgcagctaactctcaatatatttaattttttaaattctatttaaaaattgaaaaaatatttttctttaatgtcgctgcaaccatagtttgacataatgcaaccataccttgacataattaaagtcatactctgacataaagccccttattaaaaatgatgctaaaaataaattccattatgactaggtcgtcttctctgctacacatgaactcgcaagggtcgtgaagtcggttccttcaatggt

SEQ ID NO: 3091 - DNA, 250 bp, synthetic construct
  source 1..250: mol_type = other DNA
gtatgtgcagctaactctcatttaatcaaatgatatccttataaaataaatttgtactattattcatatattcatgtcgctgcaaccatagtttgacataatgcaaccataccttgacataattaaagtcatactctgacataaagccccttattaaaaatgatgctaaaaataaattccattagagcaccactgtcttctctgctacacatgaactcgcaagggtcgtgaagtcggttccttcaatggt

SEQ ID NO: 3092 - DNA, 250 bp, synthetic construct
  source 1..250: mol_type = other DNA
gtatgtgcagctaactctcgaaaagagtaaaattattaaaaataaggataatcctaaatttcatttaccagttatgtcgctgcaaccatagtttgacataatgcaaccataccttgacataattaaagtcatactctgacataaagccccttattaaaaatgatgctaaaaataaattccattacgtctcaaaagtcttctctgctacacatgaactcgcaagggtcgtgaagtcggttccttcaatggt

SEQ ID NO: 3093 - DNA, 250 bp, synthetic construct
  source 1..250: mol_type = other DNA
gtatgtgcagctaactctcacttccaataaggaatctttatttaaagaataagtatcaattagtataatttgtttgtcgctgcaaccatagtttgacataatgcaaccataccttgacataattaaagtcatactctgacataaagccccttattaaaaatgatgctaaaaataaattccattacagtccggtggtcttctctgctacacatgaactcgcaagggtcgtgaagtcggttccttcaatggt

SEQ ID NO: 3094 - DNA, 250 bp, synthetic construct
  source 1..250: mol_type = other DNA
gtatgtgcagctaactctcccaatgaagtatctaaaagctgaactaagtcagacaatccggtattaacgaagaatgtcgctgcaaccatagtttgacataatgcaaccataccttgacataattaaagtcatactctgacataaagccccttattaaaaatgatgctaaaaataaattccattagtttaacatggtcttctctgctacacatgaactcgcaagggtcgtgaagtcggttccttcaatggt

SEQ ID NO: 3095 - DNA, 250 bp, synthetic construct
  source 1..250: mol_type = other DNA
gtatgtgcagctaactctccattcaaagctgggacacgacgcaacatatcggctaagaataagctgggatttgttgtcgctgcaaccatagtttgacataatgcaaccataccttgacataattaaagtcatactctgacataaagccccttattaaaaatgatgctaaaaataaattccattaatgtcgcatagtcttctctgctacacatgaactcgcaagggtcgtgaagtcggttccttcaatggt

SEQ ID NO: 3096 - DNA, 250 bp, synthetic construct
  source 1..250: mol_type = other DNA
gtatgtgcagctaactctcgtatagacctttggggttgaataaatctgtcgtagtaaccggcttcaacaagtgatgtcgctgcaaccatagtttgacataatgcaaccataccttgacataattaaagtcatactctgacataaagccccttattaaaaatgatgctaaaaataaattccattatggttgtctcgtcttctctgctacacatgaactcgcaagggtcgtgaagtcggttccttcaatggt

SEQ ID NO: 3097 - DNA, 250 bp, synthetic construct
  source 1..250: mol_type = other DNA
gtatgtgcagctaactctcacccgtataggtggcatttcaggaggggcccgcagggaggaagttttctatgagttgtcgctgcaaccatagtttgacataatgcaaccataccttgacataattaaagtcatactctgacataaagccccttattaaaaatgatgctaaaaataaattccattatctagagtacgtcttctctgctacacatgaactcgcaagggtcgtgaagtcggttccttcaatggt

SEQ ID NO: 3098 - DNA, 250 bp, synthetic construct
  source 1..250: mol_type = other DNA
gtatgtgcagctaactctcctattcgtggccgttcgtggtaactagttgcgttcctagccactacaattttgtatgtcgctgcaaccatagtttgacataatgcaaccataccttgacataattaaagtcatactctgacataaagccccttattaaaaatgatgctaaaaataaattccattaatccttacatgtcttctctgctacacatgaactcgcaagggtcgtgaagtcggttccttcaatggt

SEQ ID NO: 3099 - DNA, 250 bp, synthetic construct
  source 1..250: mol_type = other DNA
gtatgtgcagctaactctcgtttctaagccgtgtaatgggaacaaccacaccatagcgaatcgatgcgcacttatgtcgctgcaaccatagtttgacataatgcaaccataccttgacataattaaagtcatactctgacataaagccccttattaaaaatgatgctaaaaataaattccattacaaaattgtagtcttctctgctacacatgaactcgcaagggtcgtgaagtcggttccttcaatggt

SEQ ID NO: 3100 - DNA, 250 bp, synthetic construct
  source 1..250: mol_type = other DNA
gtatgtgcagctaactctccgcctcggaataccgttttggcaaccccttactaaggccatcgcggtcctacggatgtcgctgcaaccatagtttgacataatgcaaccataccttgacataattaaagtcatactctgacataaagccccttattaaaaatgatgctaaaaataaattccattagtgacggatggtcttctctgctacacatgaactcgcaagggtcgtgaagtcggttccttcaatggt

SEQ ID NO: 3101 - DNA, 250 bp, synthetic construct
  source 1..250: mol_type = other DNA
gtatgtgcagctaactctccaggcatcgcgcacgtagggccggaccgcgcgcatgtcgaactgctggcgagctctgtcgctgcaaccatagtttgacataatgcaaccataccttgacataattaaagtcatactctgacataaagccccttattaaaaatgatgctaaaaataaattccattagtgtcacggggtcttctctgctacacatgaactcgcaagggtcgtgaagtcggttccttcaatggt

SEQ ID NO: 3102 - DNA, 250 bp, synthetic construct
  source 1..250: mol_type = other DNA
gtatgtgcagctaactctcagccgcgatcccacgaccggcgcacgatccaactgcgccggcgcgacgactgctgtgtcgctgcaaccatagtttgacataatgcaaccataccttgacataattaaagtcatactctgacataaagccccttattaaaaatgatgctaaaaataaattccattagtccagccacgtcttctctgctacacatgaactcgcaagggtcgtgaagtcggttccttcaatggt

SEQ ID NO: 3103 - DNA, 250 bp, synthetic construct
  source 1..250: mol_type = other DNA
gtatgtgcagctaactctcgcccctgctaacgccccgcccgccggaccgccctcgcgatggggcggccggctggtgtcgctgcaaccatagtttgacataatgcaaccataccttgacataattaaagtcatactctgacataaagccccttattaaaaatgatgctaaaaataaattccattataggttttcggtcttctctgctacacatgaactcgcaagggtcgtgaagtcggttccttcaatggt

SEQ ID NO: 3104 - DNA, 250 bp, synthetic construct
  source 1..250: mol_type = other DNA
gtatgtgcagctaactctcggcacgacctcgtgacgtgtgacgggggtctactcgtttggccacctcgcgccggtgtcgctgcaaccatagtttgacataatgcaaccataccttgacataattaaagtcatactctgacataaagccccttattaaaaatgatgctaaaaataaattccattaggaggggagagtcttctctgctacacatgaactcgcaagggtcgtgaagtcggttccttcaatggt

SEQ ID NO: 3105 - DNA, 250 bp, synthetic construct
  source 1..250: mol_type = other DNA
gtatgtgcagctaactctcggcgggggccggggggacggcggccgccgcgggcactgtgccgcgaccgccccggtgtcgctgcaaccatagtttgacataatgcaaccataccttgacataattaaagtcatactctgacataaagccccttattaaaaatgatgctaaaaataaattccattactgatctaaagtcttctctgctacacatgaactcgcaagggtcgtgaagtcggttccttcaatggt

SEQ ID NO: 3106 - DNA, 250 bp, synthetic construct
  source 1..250: mol_type = other DNA
gtatgtgcagctaactctcgccgggccgaggcggccccgcggtcggccgcgcatccccccgggccccgccgtcgtgtcgctgcaaccatagtttgacataatgcaaccataccttgacataattaaagtcatactctgacataaagccccttattaaaaatgatgctaaaaataaattccattatcggtgcgcagtcttctctgctacacatgaactcgcaagggtcgtgaagtcggttccttcaatggt

SEQ ID NO: 3107 - DNA, 250 bp, synthetic construct
  source 1..250: mol_type = other DNA
gtatgtgcagctaactctctctagtgacgctcatgaattcatgagcgtcaagcgagtcagtgagcgaggaagcgtgtcgctgcaaccatagtttgacataatgcaaccataccttgacataattaaagtcatactctgacataaagccccttattaaaaatgatgctaaaaataaattccattatctaatagttgtcttctctgctacacatgaactcgcaagggtcgtgaagtcggttccttcaatggt

SEQ ID NO: 3108 - DNA, 250 bp, synthetic construct
  source 1..250: mol_type = other DNA
gtatgtgcagctaactctctctagctcgccgcaatgacgctcatgaattcatgagcgtcagaggaagcggccgatgtcgctgcaaccatagtttgacataatgcaaccataccttgacataattaaagtcatactctgacataaagccccttattaaaaatgatgctaaaaataaattccattatgtcataccggtcttctctgctacacatgaactcgcaagggtcgtgaagtcggttccttcaatggt

SEQ ID NO: 3109 - DNA, 250 bp, synthetic construct
  source 1..250: mol_type = other DNA
gtatgtgcagctaactctctctagagcgagtcagtgagcgaggaagcgtgacgctcatgaattcatgagcgtcatgtcgctgcaaccatagtttgacataatgcaaccataccttgacataattaaagtcatactctgacataaagccccttattaaaaatgatgctaaaaataaattccattacttccgagacgtcttctctgctacacatgaactcgcaagggtcgtgaagtcggttccttcaatggt

SEQ ID NO: 3110 - DNA, 250 bp, synthetic construct
  source 1..250: mol_type = other DNA
gtatgtgcagctaactctctctagatattcgcgaaaatttggccaccagtcacatttcccgaaaagtgccaccttgtcgctgcaaccatagtttgacataatgcaaccataccttgacataattaaagtcatactctgacataaagccccttattaaaaatgatgctaaaaataaattccattacccggcgtttgtcttctctgctacacatgaactcgcaagggtcgtgaagtcggttccttcaatggt

SEQ ID NO: 3111 - DNA, 250 bp, synthetic construct
  source 1..250: mol_type = other DNA
gtatgtgcagctaactctctctagtcccgaaaagtgccacctgatattcgcgaaaattcgaaaagtgccacctgtgtcgctgcaaccatagtttgacataatgcaaccataccttgacataattaaagtcatactctgacataaagccccttattaaaaatgatgctaaaaataaattccattatagtccttacgtcttctctgctacacatgaactcgcaagggtcgtgaagtcggttccttcaatggt

SEQ ID NO: 3112 - DNA, 250 bp, synthetic construct
  source 1..250: mol_type = other DNA
gtatgtgcagctaactctctctagtcccgaaaagtgccacctgcgaaaagtgccacctgatattcgcgaaaatttgtcgctgcaaccatagtttgacataatgcaaccataccttgacataattaaagtcatactctgacataaagccccttattaaaaatgatgctaaaaataaattccattattgtcacaccgtcttctctgctacacatgaactcgcaagggtcgtgaagtcggttccttcaatggt

SEQ ID NO: 3113 - DNA, 250 bp, synthetic construct
  source 1..250: mol_type = other DNA
gtatgtgcagctaactctctctagatattcgcgaaaattcctgcgaaaagtgccacctgatattcgcgaaaatttgtcgctgcaaccatagtttgacataatgcaaccataccttgacataattaaagtcatactctgacataaagccccttattaaaaatgatgctaaaaataaattccattaacattgcactgtcttctctgctacacatgaactcgcaagggtcgtgaagtcggttccttcaatggt

SEQ ID NO: 3114 - DNA, 250 bp, synthetic construct
  source 1..250: mol_type = other DNA
gtatgtgcagctaactctctctagatattcgcgaaaattccatattcgcgaaaattttgatattcgcgaaaatttgtcgctgcaaccatagtttgacataatgcaaccataccttgacataattaaagtcatactctgacataaagccccttattaaaaatgatgctaaaaataaattccattactcacgtcgcgtcttctctgctacacatgaactcgcaagggtcgtgaagtcggttccttcaatggt

SEQ ID NO: 3115 - DNA, 250 bp, synthetic construct
  source 1..250: mol_type = other DNA
gtatgtgcagctaactctctctagaattttcgcgaatattggccaccagtcacatttcccgaaaagtgccaccttgtcgctgcaaccatagtttgacataatgcaaccataccttgacataattaaagtcatactctgacataaagccccttattaaaaatgatgctaaaaataaattccattatagcgacggcgtcttctctgctacacatgaactcgcaagggtcgtgaagtcggttccttcaatggt

SEQ ID NO: 3116 - DNA, 250 bp, synthetic construct
  source 1..250: mol_type = other DNA
gtatgtgcagctaactctctctagtcccgaaaagtgccacctgaattttcgcgaatatcgaaaagtgccacctgtgtcgctgcaaccatagtttgacataatgcaaccataccttgacataattaaagtcatactctgacataaagccccttattaaaaatgatgctaaaaataaattccattatcccggggatgtcttctctgctacacatgaactcgcaagggtcgtgaagtcggttccttcaatggt

SEQ ID NO: 3117 - DNA, 250 bp, synthetic construct
  source 1..250: mol_type = other DNA
gtatgtgcagctaactctctctagtcccgaaaagtgccacctgcgaaaagtgccacctgaattttcgcgaatattgtcgctgcaaccatagtttgacataatgcaaccataccttgacataattaaagtcatactctgacataaagccccttattaaaaatgatgctaaaaataaattccattatctttcacctgtcttctctgctacacatgaactcgcaagggtcgtgaagtcggttccttcaatggt

SEQ ID NO: 3118 - DNA, 250 bp, synthetic construct
  source 1..250: mol_type = other DNA
gtatgtgcagctaactctctctagaattttcgcgaatatcctgcgaaaagtgccacctgaattttcgcgaatattgtcgctgcaaccatagtttgacataatgcaaccataccttgacataattaaagtcatactctgacataaagccccttattaaaaatgatgctaaaaataaattccattacaactctgttgtcttctctgctacacatgaactcgcaagggtcgtgaagtcggttccttcaatggt

SEQ ID NO: 3119 - DNA, 250 bp, synthetic construct
  source 1..250: mol_type = other DNA
gtatgtgcagctaactctctctagaattttcgcgaatatccaattttcgcgaatatttgaattttcgcgaatattgtcgctgcaaccatagtttgacataatgcaaccataccttgacataattaaagtcatactctgacataaagccccttattaaaaatgatgctaaaaataaattccattaatgtactaaagtcttctctgctacacatgaactcgcaagggtcgtgaagtcggttccttcaatggt

SEQ ID NO: 3120 - DNA, 152 bp, synthetic construct
  source 1..152: mol_type = other DNA
aatgttgttgatgcaaccataaagtgatatttaataattatttataatcagcaacttaaccacaaaacaaccatatattgatatctcacaaaacaaccataagttgatatttttgtgaatcgagtatttcagcaaaactactgcagtaagaa

SEQ ID NO: 3121 - DNA, 152 bp, synthetic construct
  source 1..152: mol_type = other DNA
aatgttgttgatgcaaccataaagtgatatttaataattatttataatcagcaacttaaccacaaaacaaccatatattgatatctcacaaaacaaccataagttgatatttttgtgaaacgagtatttcagcaaaactactgcagtaagaa

SEQ ID NO: 3122 - DNA, 152 bp, synthetic construct
  source 1..152: mol_type = other DNA
aatgttgttgatgcaaccataaagtgatatttaataattatttataatcagcaacttaaccacaaaacaaccatatattgatatctcacaaaacaaccataagttgatatttttgtgaagcgagtatttcagcaaaactactgcagtaagaa

SEQ ID NO: 3123 - DNA, 152 bp, synthetic construct
  source 1..152: mol_type = other DNA
aatgttgttgatgcaaccataaagtgatatttaataattatttataatcagcaacttaaccacaaaacaaccatatattgatatctcacaaaacaaccataagttgatatttttgtgaaccgagtatttcagcaaaactactgcagtaagaa

SEQ ID NO: 3124 - DNA, 152 bp, synthetic construct
  source 1..152: mol_type = other DNA
aatgttgttgatgcaaccataaagtgatatttaataattatttataatcagcaacttaaccacaaaacaaccatatattgatatctcacaaaacaaccataagttgatatttttgtgattcgagtatttcagcaaaactactgcagtaagaa

SEQ ID NO: 3125 - DNA, 152 bp, synthetic construct
  source 1..152: mol_type = other DNA
aatgttgttgatgcaaccataaagtgatatttaataattatttataatcagcaacttaaccacaaaacaaccatatattgatatctcacaaaacaaccataagttgatatttttgtgagtcgagtatttcagcaaaactactgcagtaagaa

SEQ ID NO: 3126 - DNA, 152 bp, synthetic construct
  source 1..152: mol_type = other DNA
aatgttgttgatgcaaccataaagtgatatttaataattatttataatcagcaacttaaccacaaaacaaccatatattgatatctcacaaaacaaccataagttgatatttttgtgactcgagtatttcagcaaaactactgcagtaagaa

SEQ ID NO: 3127 - DNA, 152 bp, synthetic construct
  source 1..152: mol_type = other DNA
aatgttgttgatgcaaccataaagtgatatttaataattatttataatcagcaacttaaccacaaaacaaccatatattgatatctcacaaaacaaccataagttgatatttttgtgtatcgagtatttcagcaaaactactgcagtaagaa

SEQ ID NO: 3128 - DNA, 152 bp, synthetic construct
  source 1..152: mol_type = other DNA
aatgttgttgatgcaaccataaagtgatatttaataattatttataatcagcaacttaaccacaaaacaaccatatattgatatctcacaaaacaaccataagttgatatttttgtggatcgagtatttcagcaaaactactgcagtaagaa

SEQ ID NO: 3129 - DNA, 152 bp, synthetic construct
  source 1..152: mol_type = other DNA
aatgttgttgatgcaaccataaagtgatatttaataattatttataatcagcaacttaaccacaaaacaaccatatattgatatctcacaaaacaaccataagttgatatttttgtgcatcgagtatttcagcaaaactactgcagtaagaa

SEQ ID NO: 3130 - DNA, 152 bp, synthetic construct
  source 1..152: mol_type = other DNA
aatgttgttgatgcaaccataaagtgatatttaataattatttataatcagcaacttaaccacaaaacaaccatatattgatatctcacaaaacaaccataagttgatatttttgtaaatcgagtatttcagcaaaactactgcagtaagaa

SEQ ID NO: 3131 - DNA, 152 bp, synthetic construct
  source 1..152: mol_type = other DNA
aatgttgttgatgcaaccataaagtgatatttaataattatttataatcagcaacttaaccacaaaacaaccatatattgatatctcacaaaacaaccataagttgatatttttgttaatcgagtatttcagcaaaactactgcagtaagaa

SEQ ID NO: 3132 - DNA, 152 bp, synthetic construct
  source 1..152: mol_type = other DNA
aatgttgttgatgcaaccataaagtgatatttaataattatttataatcagcaacttaaccacaaaacaaccatatattgatatctcacaaaacaaccataagttgatatttttgtcaatcgagtatttcagcaaaactactgcagtaagaa

SEQ ID NO: 3133 - DNA, 152 bp, synthetic construct
  source 1..152: mol_type = other DNA
aatgttgttgatgcaaccataaagtgatatttaataattatttataatcagcaacttaaccacaaaacaaccatatattgatatctcacaaaacaaccataagttgatatttttgagaatcgagtatttcagcaaaactactgcagtaagaa

SEQ ID NO: 3134 - DNA, 152 bp, synthetic construct
  source 1..152: mol_type = other DNA
aatgttgttgatgcaaccataaagtgatatttaataattatttataatcagcaacttaaccacaaaacaaccatatattgatatctcacaaaacaaccataagttgatatttttgggaatcgagtatttcagcaaaactactgcagtaagaa

SEQ ID NO: 3135 - DNA, 152 bp, synthetic construct
  source 1..152: mol_type = other DNA
aatgttgttgatgcaaccataaagtgatatttaataattatttataatcagcaacttaaccacaaaacaaccatatattgatatctcacaaaacaaccataagttgatatttttgcgaatcgagtatttcagcaaaactactgcagtaagaa

SEQ ID NO: 3136 - DNA, 152 bp, synthetic construct
  source 1..152: mol_type = other DNA
aatgttgttgatgcaaccataaagtgatatttaataattatttataatcagcaacttaaccacaaaacaaccatatattgatatctcacaaaacaaccataagttgatatttttatgaatcgagtatttcagcaaaactactgcagtaagaa

SEQ ID NO: 3137 - DNA, 152 bp, synthetic construct
  source 1..152: mol_type = other DNA
aatgttgttgatgcaaccataaagtgatatttaataattatttataatcagcaacttaaccacaaaacaaccatatattgatatctcacaaaacaaccataagttgatatttttttgaatcgagtatttcagcaaaactactgcagtaagaa

SEQ ID NO: 3138 - DNA, 152 bp, synthetic construct
  source 1..152: mol_type = other DNA
aatgttgttgatgcaaccataaagtgatatttaataattatttataatcagcaacttaaccacaaaacaaccatatattgatatctcacaaaacaaccataagttgatatttttctgaatcgagtatttcagcaaaactactgcagtaagaa

SEQ ID NO: 3139 - DNA, 152 bp, synthetic construct
  source 1..152: mol_type = other DNA
aatgttgttgatgcaaccataaagtgatatttaataattatttataatcagcaacttaaccacaaaacaaccatatattgatatctcacaaaacaaccataagttgatattttagtgaatcgagtatttcagcaaaactactgcagtaagaa

SEQ ID NO: 3140 - DNA, 152 bp, synthetic construct
  source 1..152: mol_type = other DNA
aatgttgttgatgcaaccataaagtgatatttaataattatttataatcagcaacttaaccacaaaacaaccatatattgatatctcacaaaacaaccataagttgatattttggtgaatcgagtatttcagcaaaactactgcagtaagaa

SEQ ID NO: 3141 - DNA, 152 bp, synthetic construct
  source 1..152: mol_type = other DNA
aatgttgttgatgcaaccataaagtgatatttaataattatttataatcagcaacttaaccacaaaacaaccatatattgatatctcacaaaacaaccataagttgatattttcgtgaatcgagtatttcagcaaaactactgcagtaagaa

SEQ ID NO: 3142 - DNA, 152 bp, synthetic construct
  source 1..152: mol_type = other DNA
aatgttgttgatgcaaccataaagtgatatttaataattatttataatcagcaacttaaccacaaaacaaccatatattgatatctcacaaaacaaccataagttgatatttatgtgaatcgagtatttcagcaaaactactgcagtaagaa

SEQ ID NO: 3143 - DNA, 152 bp, synthetic construct
  source 1..152: mol_type = other DNA
aatgttgttgatgcaaccataaagtgatatttaataattatttataatcagcaacttaaccacaaaacaaccatatattgatatctcacaaaacaaccataagttgatatttgtgtgaatcgagtatttcagcaaaactactgcagtaagaa

SEQ ID NO: 3144 - DNA, 152 bp, synthetic construct
  source 1..152: mol_type = other DNA
aatgttgttgatgcaaccataaagtgatatttaataattatttataatcagcaacttaaccacaaaacaaccatatattgatatctcacaaaacaaccataagttgatatttctgtgaatcgagtatttcagcaaaactactgcagtaagaa

SEQ ID NO: 3145 - DNA, 152 bp, synthetic construct
  source 1..152: mol_type = other DNA
aatgttgttgatgcaaccataaagtgatatttaataattatttataatcagcaacttaaccacaaaacaaccatatattgatatctcacaaaacaaccataagttgatattattgtgaatcgagtatttcagcaaaactactgcagtaagaa

SEQ ID NO: 3146 - DNA, 152 bp, synthetic construct
  source 1..152: mol_type = other DNA
aatgttgttgatgcaaccataaagtgatatttaataattatttataatcagcaacttaaccacaaaacaaccatatattgatatctcacaaaacaaccataagttgatattgttgtgaatcgagtatttcagcaaaactactgcagtaagaa

SEQ ID NO: 3147 - DNA, 152 bp, synthetic construct
  source 1..152: mol_type = other DNA
aatgttgttgatgcaaccataaagtgatatttaataattatttataatcagcaacttaaccacaaaacaaccatatattgatatctcacaaaacaaccataagttgatattcttgtgaatcgagtatttcagcaaaactactgcagtaagaa

SEQ ID NO: 3148 - DNA, 152 bp, synthetic construct
  source 1..152: mol_type = other DNA
aatgttgttgatgcaaccataaagtgatatttaataattatttataatcagcaacttaaccacaaaacaaccatatattgatatctcacaaaacaaccataagttgatatatttgtgaatcgagtatttcagcaaaactactgcagtaagaa

SEQ ID NO: 3149 - DNA, 152 bp, synthetic construct
  source 1..152: mol_type = other DNA
aatgttgttgatgcaaccataaagtgatatttaataattatttataatcagcaacttaaccacaaaacaaccatatattgatatctcacaaaacaaccataagttgatatgtttgtgaatcgagtatttcagcaaaactactgcagtaagaa

SEQ ID NO: 3150 - DNA, 152 bp, synthetic construct
  source 1..152: mol_type = other DNA
aatgttgttgatgcaaccataaagtgatatttaataattatttataatcagcaacttaaccacaaaacaaccatatattgatatctcacaaaacaaccataagttgatatctttgtgaatcgagtatttcagcaaaactactgcagtaagaa

SEQ ID NO: 3151 - DNA, 152 bp, synthetic construct
  source 1..152: mol_type = other DNA
aatgttgttgatgcaaccataaagtgatatttaataattatttataatcagcaacttaaccacaaaacaaccatatattgatatctcacaaaacaaccataagttgataattttgtgaatcgagtatttcagcaaaactactgcagtaagaa

SEQ ID NO: 3152 - DNA, 152 bp, synthetic construct
  source 1..152: mol_type = other DNA
aatgttgttgatgcaaccataaagtgatatttaataattatttataatcagcaacttaaccacaaaacaaccatatattgatatctcacaaaacaaccataagttgatagttttgtgaatcgagtatttcagcaaaactactgcagtaagaa

SEQ ID NO: 3153 - DNA, 152 bp, synthetic construct
  source 1..152: mol_type = other DNA
aatgttgttgatgcaaccataaagtgatatttaataattatttataatcagcaacttaaccacaaaacaaccatatattgatatctcacaaaacaaccataagttgatacttttgtgaatcgagtatttcagcaaaactactgcagtaagaa

SEQ ID NO: 3154 - DNA, 152 bp, synthetic construct
  source 1..152: mol_type = other DNA
aatgttgttgatgcaaccataaagtgatatttaataattatttataatcagcaacttaaccacaaaacaaccatatattgatatctcacaaaacaaccataagttgatttttttgtgaatcgagtatttcagcaaaactactgcagtaagaa

SEQ ID NO: 3155 - DNA, 152 bp, synthetic construct
  source 1..152: mol_type = other DNA
aatgttgttgatgcaaccataaagtgatatttaataattatttataatcagcaacttaaccacaaaacaaccatatattgatatctcacaaaacaaccataagttgatgtttttgtgaatcgagtatttcagcaaaactactgcagtaagaa

SEQ ID NO: 3156 - DNA, 152 bp, synthetic construct
  source 1..152: mol_type = other DNA
aatgttgttgatgcaaccataaagtgatatttaataattatttataatcagcaacttaaccacaaaacaaccatatattgatatctcacaaaacaaccataagttgatctttttgtgaatcgagtatttcagcaaaactactgcagtaagaa

SEQ ID NO: 3157 - DNA, 152 bp, synthetic construct
  source 1..152: mol_type = other DNA
aatgttgttgatgcaaccataaagtgatatttaataattatttataatcagcaacttaaccacaaaacaaccatatattgatatctcacaaaacaaccataagttgaaatttttgtgaatcgagtatttcagcaaaactactgcagtaagaa

SEQ ID NO: 3158 - DNA, 152 bp, synthetic construct
  source 1..152: mol_type = other DNA
aatgttgttgatgcaaccataaagtgatatttaataattatttataatcagcaacttaaccacaaaacaaccatatattgatatctcacaaaacaaccataagttgagatttttgtgaatcgagtatttcagcaaaactactgcagtaagaa

SEQ ID NO: 3159 - DNA, 152 bp, synthetic construct
  source 1..152: mol_type = other DNA
aatgttgttgatgcaaccataaagtgatatttaataattatttataatcagcaacttaaccacaaaacaaccatatattgatatctcacaaaacaaccataagttgacatttttgtgaatcgagtatttcagcaaaactactgcagtaagaa

SEQ ID NO: 3160 - DNA, 152 bp, synthetic construct
  source 1..152: mol_type = other DNA
aatgttgttgatgcaaccataaagtgatatttaataattatttataatcagcaacttaaccacaaaacaaccatatattgatatctcacaaaacaaccataagttgttatttttgtgaatcgagtatttcagcaaaactactgcagtaagaa

SEQ ID NO: 3161 - DNA, 152 bp, synthetic construct
  source 1..152: mol_type = other DNA
aatgttgttgatgcaaccataaagtgatatttaataattatttataatcagcaacttaaccacaaaacaaccatatattgatatctcacaaaacaaccataagttggtatttttgtgaatcgagtatttcagcaaaactactgcagtaagaa

SEQ ID NO: 3162 - DNA, 152 bp, synthetic construct
  source 1..152: mol_type = other DNA
aatgttgttgatgcaaccataaagtgatatttaataattatttataatcagcaacttaaccacaaaacaaccatatattgatatctcacaaaacaaccataagttgctatttttgtgaatcgagtatttcagcaaaactactgcagtaagaa

SEQ ID NO: 3163 - DNA, 152 bp, synthetic construct
  source 1..152: mol_type = other DNA
aatgttgttgatgcaaccataaagtgatatttaataattatttataatcagcaacttaaccacaaaacaaccatatattgatatctcacaaaacaaccataagttaatatttttgtgaatcgagtatttcagcaaaactactgcagtaagaa

SEQ ID NO: 3164 - DNA, 152 bp, synthetic construct
  source 1..152: mol_type = other DNA
aatgttgttgatgcaaccataaagtgatatttaataattatttataatcagcaacttaaccacaaaacaaccatatattgatatctcacaaaacaaccataagtttatatttttgtgaatcgagtatttcagcaaaactactgcagtaagaa

SEQ ID NO: 3165 - DNA, 152 bp, synthetic construct
  source 1..152: mol_type = other DNA
aatgttgttgatgcaaccataaagtgatatttaataattatttataatcagcaacttaaccacaaaacaaccatatattgatatctcacaaaacaaccataagttcatatttttgtgaatcgagtatttcagcaaaactactgcagtaagaa

SEQ ID NO: 3166 - DNA, 152 bp, synthetic construct
  source 1..152: mol_type = other DNA
aatgttgttgatgcaaccataaagtgatatttaataattatttataatcagcaacttaaccacaaaacaaccatatattgatatctcacaaaacaaccataagtagatatttttgtgaatcgagtatttcagcaaaactactgcagtaagaa

SEQ ID NO: 3167 - DNA, 152 bp, synthetic construct
  source 1..152: mol_type = other DNA
aatgttgttgatgcaaccataaagtgatatttaataattatttataatcagcaacttaaccacaaaacaaccatatattgatatctcacaaaacaaccataagtggatatttttgtgaatcgagtatttcagcaaaactactgcagtaagaa

SEQ ID NO: 3168 - DNA, 152 bp, synthetic construct
  source 1..152: mol_type = other DNA
aatgttgttgatgcaaccataaagtgatatttaataattatttataatcagcaacttaaccacaaaacaaccatatattgatatctcacaaaacaaccataagtcgatatttttgtgaatcgagtatttcagcaaaactactgcagtaagaa

SEQ ID NO: 3169 - DNA, 152 bp, synthetic construct
  source 1..152: mol_type = other DNA
aatgttgttgatgcaaccataaagtgatatttaataattatttataatcagcaacttaaccacaaaacaaccatatattgatatctcacaaaacaaccataagatgatatttttgtgaatcgagtatttcagcaaaactactgcagtaagaa

SEQ ID NO: 3170 - DNA, 152 bp, synthetic construct
  source 1..152: mol_type = other DNA
aatgttgttgatgcaaccataaagtgatatttaataattatttataatcagcaacttaaccacaaaacaaccatatattgatatctcacaaaacaaccataaggtgatatttttgtgaatcgagtatttcagcaaaactactgcagtaagaa

SEQ ID NO: 3171 - DNA, 152 bp, synthetic construct
  source 1..152: mol_type = other DNA
aatgttgttgatgcaaccataaagtgatatttaataattatttataatcagcaacttaaccacaaaacaaccatatattgatatctcacaaaacaaccataagctgatatttttgtgaatcgagtatttcagcaaaactactgcagtaagaa

SEQ ID NO: 3172 - DNA, 152 bp, synthetic construct
  source 1..152: mol_type = other DNA
aatgttgttgatgcaaccataaagtgatatttaataattatttataatcagcaacttaaccacaaaacaaccatatattgatatctcacaaaacaaccataaattgatatttttgtgaatcgagtatttcagcaaaactactgcagtaagaa

SEQ ID NO: 3173 - DNA, 152 bp, synthetic construct
  source 1..152: mol_type = other DNA
aatgttgttgatgcaaccataaagtgatatttaataattatttataatcagcaacttaaccacaaaacaaccatatattgatatctcacaaaacaaccataatttgatatttttgtgaatcgagtatttcagcaaaactactgcagtaagaa

SEQ ID NO: 3174 - DNA, 152 bp, synthetic construct
  source 1..152: mol_type = other DNA
aatgttgttgatgcaaccataaagtgatatttaataattatttataatcagcaacttaaccacaaaacaaccatatattgatatctcacaaaacaaccataacttgatatttttgtgaatcgagtatttcagcaaaactactgcagtaagaa

SEQ ID NO: 3175 - DNA, 152 bp, synthetic construct
  source 1..152: mol_type = other DNA
aatgttgttgatgcaaccataaagtgatatttaataattatttataatcagcaacttaaccacaaaacaaccatatattgatatctcacaaaacaaccatatgttgatatttttgtgaatcgagtatttcagcaaaactactgcagtaagaa

SEQ ID NO: 3176 - DNA, 152 bp, synthetic construct
  source 1..152: mol_type = other DNA
aatgttgttgatgcaaccataaagtgatatttaataattatttataatcagcaacttaaccacaaaacaaccatatattgatatctcacaaaacaaccataggttgatatttttgtgaatcgagtatttcagcaaaactactgcagtaagaa

SEQ ID NO: 3177 - DNA, 152 bp, synthetic construct
  source 1..152: mol_type = other DNA
aatgttgttgatgcaaccataaagtgatatttaataattatttataatcagcaacttaaccacaaaacaaccatatattgatatctcacaaaacaaccatacgttgatatttttgtgaatcgagtatttcagcaaaactactgcagtaagaa

SEQ ID NO: 3178 - DNA, 152 bp, synthetic construct
  source 1..152: mol_type = other DNA
aatgttgttgatgcaaccataaagtgatatttaataattatttataatcagcaacttaaccacaaaacaaccatatattgatatctcacaaaacaaccattagttgatatttttgtgaatcgagtatttcagcaaaactactgcagtaagaa

SEQ ID NO: 3179 - DNA, 152 bp, synthetic construct
  source 1..152: mol_type = other DNA
aatgttgttgatgcaaccataaagtgatatttaataattatttataatcagcaacttaaccacaaaacaaccatatattgatatctcacaaaacaaccatgagttgatatttttgtgaatcgagtatttcagcaaaactactgcagtaagaa

SEQ ID NO: 3180 - DNA, 152 bp, synthetic construct
  source 1..152: mol_type = other DNA
aatgttgttgatgcaaccataaagtgatatttaataattatttataatcagcaacttaaccacaaaacaaccatatattgatatctcacaaaacaaccatcagttgatatttttgtgaatcgagtatttcagcaaaactactgcagtaagaa

SEQ ID NO: 3181 - DNA, 152 bp, synthetic construct
  source 1..152: mol_type = other DNA
aatgttgttgatgcaaccataaagtgatatttaataattatttataatcagcaacttaaccacaaaacaaccatatattgatatctcacaaaacaaccaaaagttgatatttttgtgaatcgagtatttcagcaaaactactgcagtaagaa

SEQ ID NO: 3182 - DNA, 152 bp, synthetic construct
  source 1..152: mol_type = other DNA
aatgttgttgatgcaaccataaagtgatatttaataattatttataatcagcaacttaaccacaaaacaaccatatattgatatctcacaaaacaaccagaagttgatatttttgtgaatcgagtatttcagcaaaactactgcagtaagaa

SEQ ID NO: 3183 - DNA, 152 bp, synthetic construct
  source 1..152: mol_type = other DNA
aatgttgttgatgcaaccataaagtgatatttaataattatttataatcagcaacttaaccacaaaacaaccatatattgatatctcacaaaacaaccacaagttgatatttttgtgaatcgagtatttcagcaaaactactgcagtaagaa

SEQ ID NO: 3184 - DNA, 152 bp, synthetic construct
  source 1..152: mol_type = other DNA
aatgttgttgatgcaaccataaagtgatatttaataattatttataatcagcaacttaaccacaaaacaaccatatattgatatctcacaaaacaaccttaagttgatatttttgtgaatcgagtatttcagcaaaactactgcagtaagaa

SEQ ID NO: 3185 - DNA, 152 bp, synthetic construct
  source 1..152: mol_type = other DNA
aatgttgttgatgcaaccataaagtgatatttaataattatttataatcagcaacttaaccacaaaacaaccatatattgatatctcacaaaacaaccgtaagttgatatttttgtgaatcgagtatttcagcaaaactactgcagtaagaa

SEQ ID NO: 3186 - DNA, 152 bp, synthetic construct
  source 1..152: mol_type = other DNA
aatgttgttgatgcaaccataaagtgatatttaataattatttataatcagcaacttaaccacaaaacaaccatatattgatatctcacaaaacaaccctaagttgatatttttgtgaatcgagtatttcagcaaaactactgcagtaagaa

SEQ ID NO: 3187 - DNA, 152 bp, synthetic construct
  source 1..152: mol_type = other DNA
aatgttgttgatgcaaccataaagtgatatttaataattatttataatcagcaacttaaccacaaaacaaccatatattgatatctcacaaaacaacaataagttgatatttttgtgaatcgagtatttcagcaaaactactgcagtaagaa

SEQ ID NO: 3188 - DNA, 152 bp, synthetic construct
  source 1..152: mol_type = other DNA
aatgttgttgatgcaaccataaagtgatatttaataattatttataatcagcaacttaaccacaaaacaaccatatattgatatctcacaaaacaactataagttgatatttttgtgaatcgagtatttcagcaaaactactgcagtaagaa

SEQ ID NO: 3189 - DNA, 152 bp, synthetic construct
  source 1..152: mol_type = other DNA
aatgttgttgatgcaaccataaagtgatatttaataattatttataatcagcaacttaaccacaaaacaaccatatattgatatctcacaaaacaacgataagttgatatttttgtgaatcgagtatttcagcaaaactactgcagtaagaa

SEQ ID NO: 3190 - DNA, 152 bp, synthetic construct
  source 1..152: mol_type = other DNA
aatgttgttgatgcaaccataaagtgatatttaataattatttataatcagcaacttaaccacaaaacaaccatatattgatatctcacaaaacaaacataagttgatatttttgtgaatcgagtatttcagcaaaactactgcagtaagaa

SEQ ID NO: 3191 - DNA, 152 bp, synthetic construct
  source 1..152: mol_type = other DNA
aatgttgttgatgcaaccataaagtgatatttaataattatttataatcagcaacttaaccacaaaacaaccatatattgatatctcacaaaacaatcataagttgatatttttgtgaatcgagtatttcagcaaaactactgcagtaagaa

SEQ ID NO: 3192 - DNA, 152 bp, synthetic construct
  source 1..152: mol_type = other DNA
aatgttgttgatgcaaccataaagtgatatttaataattatttataatcagcaacttaaccacaaaacaaccatatattgatatctcacaaaacaagcataagttgatatttttgtgaatcgagtatttcagcaaaactactgcagtaagaa

SEQ ID NO: 3193 - DNA, 152 bp, synthetic construct
  source 1..152: mol_type = other DNA
aatgttgttgatgcaaccataaagtgatatttaataattatttataatcagcaacttaaccacaaaacaaccatatattgatatctcacaaaacatccataagttgatatttttgtgaatcgagtatttcagcaaaactactgcagtaagaa

SEQ ID NO: 3194 - DNA, 152 bp, synthetic construct
  source 1..152: mol_type = other DNA
aatgttgttgatgcaaccataaagtgatatttaataattatttataatcagcaacttaaccacaaaacaaccatatattgatatctcacaaaacagccataagttgatatttttgtgaatcgagtatttcagcaaaactactgcagtaagaa

SEQ ID NO: 3195 - DNA, 152 bp, synthetic construct
  source 1..152: mol_type = other DNA
aatgttgttgatgcaaccataaagtgatatttaataattatttataatcagcaacttaaccacaaaacaaccatatattgatatctcacaaaacacccataagttgatatttttgtgaatcgagtatttcagcaaaactactgcagtaagaa

SEQ ID NO: 3196 - DNA, 152 bp, synthetic construct
  source 1..152: mol_type = other DNA
aatgttgttgatgcaaccataaagtgatatttaataattatttataatcagcaacttaaccacaaaacaaccatatattgatatctcacaaaactaccataagttgatatttttgtgaatcgagtatttcagcaaaactactgcagtaagaa

SEQ ID NO: 3197 - DNA, 152 bp, synthetic construct
  source 1..152: mol_type = other DNA
aatgttgttgatgcaaccataaagtgatatttaataattatttataatcagcaacttaaccacaaaacaaccatatattgatatctcacaaaacgaccataagttgatatttttgtgaatcgagtatttcagcaaaactactgcagtaagaa

SEQ ID NO: 3198 - DNA, 152 bp, synthetic construct
  source 1..152: mol_type = other DNA
aatgttgttgatgcaaccataaagtgatatttaataattatttataatcagcaacttaaccacaaaacaaccatatattgatatctcacaaaaccaccataagttgatatttttgtgaatcgagtatttcagcaaaactactgcagtaagaa

SEQ ID NO: 3199 - DNA, 152 bp, synthetic construct
  source 1..152: mol_type = other DNA
aatgttgttgatgcaaccataaagtgatatttaataattatttataatcagcaacttaaccacaaaacaaccatatattgatatctcacaaaaaaaccataagttgatatttttgtgaatcgagtatttcagcaaaactactgcagtaagaa

SEQ ID NO: 3200 - DNA, 152 bp, synthetic construct
  source 1..152: mol_type = other DNA
aatgttgttgatgcaaccataaagtgatatttaataattatttataatcagcaacttaaccacaaaacaaccatatattgatatctcacaaaataaccataagttgatatttttgtgaatcgagtatttcagcaaaactactgcagtaagaa

SEQ ID NO: 3201 - DNA, 152 bp, synthetic construct
  source 1..152: mol_type = other DNA
aatgttgttgatgcaaccataaagtgatatttaataattatttataatcagcaacttaaccacaaaacaaccatatattgatatctcacaaaagaaccataagttgatatttttgtgaatcgagtatttcagcaaaactactgcagtaagaa

SEQ ID NO: 3202 - DNA, 152 bp, synthetic construct
  source 1..152: mol_type = other DNA
aatgttgttgatgcaaccataaagtgatatttaataattatttataatcagcaacttaaccacaaaacaaccatatattgatatctcacaaatcaaccataagttgatatttttgtgaatcgagtatttcagcaaaactactgcagtaagaa

SEQ ID NO: 3203 - DNA, 152 bp, synthetic construct
  source 1..152: mol_type = other DNA
aatgttgttgatgcaaccataaagtgatatttaataattatttataatcagcaacttaaccacaaaacaaccatatattgatatctcacaaagcaaccataagttgatatttttgtgaatcgagtatttcagcaaaactactgcagtaagaa

SEQ ID NO: 3204 - DNA, 152 bp, synthetic construct
  source 1..152: mol_type = other DNA
aatgttgttgatgcaaccataaagtgatatttaataattatttataatcagcaacttaaccacaaaacaaccatatattgatatctcacaaaccaaccataagttgatatttttgtgaatcgagtatttcagcaaaactactgcagtaagaa

SEQ ID NO: 3205 - DNA, 152 bp, synthetic construct
  source 1..152: mol_type = other DNA
aatgttgttgatgcaaccataaagtgatatttaataattatttataatcagcaacttaaccacaaaacaaccatatattgatatctcacaatacaaccataagttgatatttttgtgaatcgagtatttcagcaaaactactgcagtaagaa

SEQ ID NO: 3206 - DNA, 152 bp, synthetic construct
  source 1..152: mol_type = other DNA
aatgttgttgatgcaaccataaagtgatatttaataattatttataatcagcaacttaaccacaaaacaaccatatattgatatctcacaagacaaccataagttgatatttttgtgaatcgagtatttcagcaaaactactgcagtaagaa

SEQ ID NO: 3207 - DNA, 152 bp, synthetic construct
  source 1..152: mol_type = other DNA
aatgttgttgatgcaaccataaagtgatatttaataattatttataatcagcaacttaaccacaaaacaaccatatattgatatctcacaacacaaccataagttgatatttttgtgaatcgagtatttcagcaaaactactgcagtaagaa

SEQ ID NO: 3208 - DNA, 152 bp, synthetic construct
  source 1..152: mol_type = other DNA
aatgttgttgatgcaaccataaagtgatatttaataattatttataatcagcaacttaaccacaaaacaaccatatattgatatctcacataacaaccataagttgatatttttgtgaatcgagtatttcagcaaaactactgcagtaagaa

SEQ ID NO: 3209 - DNA, 152 bp, synthetic construct
  source 1..152: mol_type = other DNA
aatgttgttgatgcaaccataaagtgatatttaataattatttataatcagcaacttaaccacaaaacaaccatatattgatatctcacagaacaaccataagttgatatttttgtgaatcgagtatttcagcaaaactactgcagtaagaa

SEQ ID NO: 3210 - DNA, 152 bp, synthetic construct
  source 1..152: mol_type = other DNA
aatgttgttgatgcaaccataaagtgatatttaataattatttataatcagcaacttaaccacaaaacaaccatatattgatatctcacacaacaaccataagttgatatttttgtgaatcgagtatttcagcaaaactactgcagtaagaa

SEQ ID NO: 3211 - DNA, 152 bp, synthetic construct
  source 1..152: mol_type = other DNA
aatgttgttgatgcaaccataaagtgatatttaataattatttataatcagcaacttaaccacaaaacaaccatatattgatatctcactaaacaaccataagttgatatttttgtgaatcgagtatttcagcaaaactactgcagtaagaa

SEQ ID NO: 3212 - DNA, 152 bp, synthetic construct
  source 1..152: mol_type = other DNA
aatgttgttgatgcaaccataaagtgatatttaataattatttataatcagcaacttaaccacaaaacaaccatatattgatatctcacgaaacaaccataagttgatatttttgtgaatcgagtatttcagcaaaactactgcagtaagaa

SEQ ID NO: 3213 - DNA, 152 bp, synthetic construct
  source 1..152: mol_type = other DNA
aatgttgttgatgcaaccataaagtgatatttaataattatttataatcagcaacttaaccacaaaacaaccatatattgatatctcaccaaacaaccataagttgatatttttgtgaatcgagtatttcagcaaaactactgcagtaagaa

SEQ ID NO: 3214 - DNA, 152 bp, synthetic construct
  source 1..152: mol_type = other DNA
aatgttgttgatgcaaccataaagtgatatttaataattatttataatcagcaacttaaccacaaaacaaccatatattgatatctcaaaaaacaaccataagttgatatttttgtgaatcgagtatttcagcaaaactactgcagtaagaa

SEQ ID NO: 3215 - DNA, 152 bp, synthetic construct
  source 1..152: mol_type = other DNA
aatgttgttgatgcaaccataaagtgatatttaataattatttataatcagcaacttaaccacaaaacaaccatatattgatatctcataaaacaaccataagttgatatttttgtgaatcgagtatttcagcaaaactactgcagtaagaa

SEQ ID NO: 3216 - DNA, 152 bp, synthetic construct
  source 1..152: mol_type = other DNA
aatgttgttgatgcaaccataaagtgatatttaataattatttataatcagcaacttaaccacaaaacaaccatatattgatatctcagaaaacaaccataagttgatatttttgtgaatcgagtatttcagcaaaactactgcagtaagaa

SEQ ID NO: 3217 - DNA, 152 bp, synthetic construct
  source 1..152: mol_type = other DNA
aatgttgttgatgcaaccataaagtgatatttaataattatttataatcagcaacttaaccacaaaacaaccatatattgatatctctcaaaacaaccataagttgatatttttgtgaatcgagtatttcagcaaaactactgcagtaagaa

SEQ ID NO: 3218 - DNA, 152 bp, synthetic construct
  source 1..152: mol_type = other DNA
aatgttgttgatgcaaccataaagtgatatttaataattatttataatcagcaacttaaccacaaaacaaccatatattgatatctcgcaaaacaaccataagttgatatttttgtgaatcgagtatttcagcaaaactactgcagtaagaa

SEQ ID NO: 3219 - DNA, 152 bp, synthetic construct
  source 1..152: mol_type = other DNA
aatgttgttgatgcaaccataaagtgatatttaataattatttataatcagcaacttaaccacaaaacaaccatatattgatatctcccaaaacaaccataagttgatatttttgtgaatcgagtatttcagcaaaactactgcagtaagaa

SEQ ID NO: 3220 - DNA, 152 bp, synthetic construct
  source 1..152: mol_type = other DNA
aatgttgttgatgcaaccataaagtgatatttaataattatttataatcagcaacttaaccacaaaacaaccatatattgatatctaacaaaacaaccataagttgatatttttgtgaatcgagtatttcagcaaaactactgcagtaagaa

SEQ ID NO: 3221 - DNA, 152 bp, synthetic construct
  source 1..152: mol_type = other DNA
aatgttgttgatgcaaccataaagtgatatttaataattatttataatcagcaacttaaccacaaaacaaccatatattgatatcttacaaaacaaccataagttgatatttttgtgaatcgagtatttcagcaaaactactgcagtaagaa

SEQ ID NO: 3222 - DNA, 152 bp, synthetic construct
  source 1..152: mol_type = other DNA
aatgttgttgatgcaaccataaagtgatatttaataattatttataatcagcaacttaaccacaaaacaaccatatattgatatctgacaaaacaaccataagttgatatttttgtgaatcgagtatttcagcaaaactactgcagtaagaa

SEQ ID NO: 3223 - DNA, 152 bp, synthetic construct
  source 1..152: mol_type = other DNA
aatgttgttgatgcaaccataaagtgatatttaataattatttataatcagcaacttaaccacaaaacaaccatatattgatatcacacaaaacaaccataagttgatatttttgtgaatcgagtatttcagcaaaactactgcagtaagaa

SEQ ID NO: 3224 - DNA, 152 bp, synthetic construct
  source 1..152: mol_type = other DNA
aatgttgttgatgcaaccataaagtgatatttaataattatttataatcagcaacttaaccacaaaacaaccatatattgatatcgcacaaaacaaccataagttgatatttttgtgaatcgagtatttcagcaaaactactgcagtaagaa

SEQ ID NO: 3225 - DNA, 152 bp, synthetic construct
  source 1..152: mol_type = other DNA
aatgttgttgatgcaaccataaagtgatatttaataattatttataatcagcaacttaaccacaaaacaaccatatattgatatcccacaaaacaaccataagttgatatttttgtgaatcgagtatttcagcaaaactactgcagtaagaa

SEQ ID NO: 3226 - DNA, 152 bp, synthetic construct
  source 1..152: mol_type = other DNA
aatgttgttgatgcaaccataaagtgatatttaataattatttataatcagcaacttaaccacaaaacaaccatatattgatatatcacaaaacaaccataagttgatatttttgtgaatcgagtatttcagcaaaactactgcagtaagaa

SEQ ID NO: 3227 - DNA, 152 bp, synthetic construct
  source 1..152: mol_type = other DNA
aatgttgttgatgcaaccataaagtgatatttaataattatttataatcagcaacttaaccacaaaacaaccatatattgatatttcacaaaacaaccataagttgatatttttgtgaatcgagtatttcagcaaaactactgcagtaagaa

SEQ ID NO: 3228 - DNA, 152 bp, synthetic construct
  source 1..152: mol_type = other DNA
aatgttgttgatgcaaccataaagtgatatttaataattatttataatcagcaacttaaccacaaaacaaccatatattgatatgtcacaaaacaaccataagttgatatttttgtgaatcgagtatttcagcaaaactactgcagtaagaa

SEQ ID NO: 3229 - DNA, 152 bp, synthetic construct
  source 1..152: mol_type = other DNA
aatgttgttgatgcaaccataaagtgatatttaataattatttataatcagcaacttaaccacaaaacaaccatatattgataactcacaaaacaaccataagttgatatttttgtgaatcgagtatttcagcaaaactactgcagtaagaa

SEQ ID NO: 3230 - DNA, 152 bp, synthetic construct
  source 1..152: mol_type = other DNA
aatgttgttgatgcaaccataaagtgatatttaataattatttataatcagcaacttaaccacaaaacaaccatatattgatagctcacaaaacaaccataagttgatatttttgtgaatcgagtatttcagcaaaactactgcagtaagaa

SEQ ID NO: 3231 - DNA, 152 bp, synthetic construct
  source 1..152: mol_type = other DNA
aatgttgttgatgcaaccataaagtgatatttaataattatttataatcagcaacttaaccacaaaacaaccatatattgatacctcacaaaacaaccataagttgatatttttgtgaatcgagtatttcagcaaaactactgcagtaagaa

SEQ ID NO: 3232 - DNA, 152 bp, synthetic construct
  source 1..152: mol_type = other DNA
aatgttgttgatgcaaccataaagtgatatttaataattatttataatcagcaacttaaccacaaaacaaccatatattgatttctcacaaaacaaccataagttgatatttttgtgaatcgagtatttcagcaaaactactgcagtaagaa

SEQ ID NO: 3233 - DNA, 152 bp, synthetic construct
  source 1..152: mol_type = other DNA
aatgttgttgatgcaaccataaagtgatatttaataattatttataatcagcaacttaaccacaaaacaaccatatattgatgtctcacaaaacaaccataagttgatatttttgtgaatcgagtatttcagcaaaactactgcagtaagaa

SEQ ID NO: 3234 - DNA, 152 bp, synthetic construct
  source 1..152: mol_type = other DNA
aatgttgttgatgcaaccataaagtgatatttaataattatttataatcagcaacttaaccacaaaacaaccatatattgatctctcacaaaacaaccataagttgatatttttgtgaatcgagtatttcagcaaaactactgcagtaagaa

SEQ ID NO: 3235 - DNA, 152 bp, synthetic construct
  source 1..152: mol_type = other DNA
aatgttgttgatgcaaccataaagtgatatttaataattatttataatcagcaacttaaccacaaaacaaccatatattgaaatctcacaaaacaaccataagttgatatttttgtgaatcgagtatttcagcaaaactactgcagtaagaa

SEQ ID NO: 3236 - DNA, 152 bp, synthetic construct
  source 1..152: mol_type = other DNA
aatgttgttgatgcaaccataaagtgatatttaataattatttataatcagcaacttaaccacaaaacaaccatatattgagatctcacaaaacaaccataagttgatatttttgtgaatcgagtatttcagcaaaactactgcagtaagaa

SEQ ID NO: 3237 - DNA, 152 bp, synthetic construct
  source 1..152: mol_type = other DNA
aatgttgttgatgcaaccataaagtgatatttaataattatttataatcagcaacttaaccacaaaacaaccatatattgacatctcacaaaacaaccataagttgatatttttgtgaatcgagtatttcagcaaaactactgcagtaagaa

SEQ ID NO: 3238 - DNA, 152 bp, synthetic construct
  source 1..152: mol_type = other DNA
aatgttgttgatgcaaccataaagtgatatttaataattatttataatcagcaacttaaccacaaaacaaccatatattgttatctcacaaaacaaccataagttgatatttttgtgaatcgagtatttcagcaaaactactgcagtaagaa

SEQ ID NO: 3239 - DNA, 152 bp, synthetic construct
  source 1..152: mol_type = other DNA
aatgttgttgatgcaaccataaagtgatatttaataattatttataatcagcaacttaaccacaaaacaaccatatattggtatctcacaaaacaaccataagttgatatttttgtgaatcgagtatttcagcaaaactactgcagtaagaa

SEQ ID NO: 3240 - DNA, 152 bp, synthetic construct
  source 1..152: mol_type = other DNA
aatgttgttgatgcaaccataaagtgatatttaataattatttataatcagcaacttaaccacaaaacaaccatatattgctatctcacaaaacaaccataagttgatatttttgtgaatcgagtatttcagcaaaactactgcagtaagaa

SEQ ID NO: 3241 - DNA, 152 bp, synthetic construct
  source 1..152: mol_type = other DNA
aatgttgttgatgcaaccataaagtgatatttaataattatttataatcagcaacttaaccacaaaacaaccatatattaatatctcacaaaacaaccataagttgatatttttgtgaatcgagtatttcagcaaaactactgcagtaagaa

SEQ ID NO: 3242 - DNA, 152 bp, synthetic construct
  source 1..152: mol_type = other DNA
aatgttgttgatgcaaccataaagtgatatttaataattatttataatcagcaacttaaccacaaaacaaccatatatttatatctcacaaaacaaccataagttgatatttttgtgaatcgagtatttcagcaaaactactgcagtaagaa

SEQ ID NO: 3243 - DNA, 152 bp, synthetic construct
  source 1..152: mol_type = other DNA
aatgttgttgatgcaaccataaagtgatatttaataattatttataatcagcaacttaaccacaaaacaaccatatattcatatctcacaaaacaaccataagttgatatttttgtgaatcgagtatttcagcaaaactactgcagtaagaa

SEQ ID NO: 3244 - DNA, 152 bp, synthetic construct
  source 1..152: mol_type = other DNA
aatgttgttgatgcaaccataaagtgatatttaataattatttataatcagcaacttaaccacaaaacaaccatatatagatatctcacaaaacaaccataagttgatatttttgtgaatcgagtatttcagcaaaactactgcagtaagaa

SEQ ID NO: 3245 - DNA, 152 bp, synthetic construct
  source 1..152: mol_type = other DNA
aatgttgttgatgcaaccataaagtgatatttaataattatttataatcagcaacttaaccacaaaacaaccatatatggatatctcacaaaacaaccataagttgatatttttgtgaatcgagtatttcagcaaaactactgcagtaagaa

SEQ ID NO: 3246 - DNA, 152 bp, synthetic construct
  source 1..152: mol_type = other DNA
aatgttgttgatgcaaccataaagtgatatttaataattatttataatcagcaacttaaccacaaaacaaccatatatcgatatctcacaaaacaaccataagttgatatttttgtgaatcgagtatttcagcaaaactactgcagtaagaa

SEQ ID NO: 3247 - DNA, 152 bp, synthetic construct
  source 1..152: mol_type = other DNA
aatgttgttgatgcaaccataaagtgatatttaataattatttataatcagcaacttaaccacaaaacaaccatataatgatatctcacaaaacaaccataagttgatatttttgtgaatcgagtatttcagcaaaactactgcagtaagaa

SEQ ID NO: 3248 - DNA, 152 bp, synthetic construct
  source 1..152: mol_type = other DNA
aatgttgttgatgcaaccataaagtgatatttaataattatttataatcagcaacttaaccacaaaacaaccatatagtgatatctcacaaaacaaccataagttgatatttttgtgaatcgagtatttcagcaaaactactgcagtaagaa

SEQ ID NO: 3249 - DNA, 152 bp, synthetic construct
  source 1..152: mol_type = other DNA
aatgttgttgatgcaaccataaagtgatatttaataattatttataatcagcaacttaaccacaaaacaaccatatactgatatctcacaaaacaaccataagttgatatttttgtgaatcgagtatttcagcaaaactactgcagtaagaa

SEQ ID NO: 3250 - DNA, 152 bp, synthetic construct
  source 1..152: mol_type = other DNA
aatgttgttgatgcaaccataaagtgatatttaataattatttataatcagcaacttaaccacaaaacaaccatattttgatatctcacaaaacaaccataagttgatatttttgtgaatcgagtatttcagcaaaactactgcagtaagaa

SEQ ID NO: 3251 - DNA, 152 bp, synthetic construct
  source 1..152: mol_type = other DNA
aatgttgttgatgcaaccataaagtgatatttaataattatttataatcagcaacttaaccacaaaacaaccatatgttgatatctcacaaaacaaccataagttgatatttttgtgaatcgagtatttcagcaaaactactgcagtaagaa

SEQ ID NO: 3252 - DNA, 152 bp, synthetic construct
  source 1..152: mol_type = other DNA
aatgttgttgatgcaaccataaagtgatatttaataattatttataatcagcaacttaaccacaaaacaaccatatcttgatatctcacaaaacaaccataagttgatatttttgtgaatcgagtatttcagcaaaactactgcagtaagaa

SEQ ID NO: 3253 - DNA, 152 bp, synthetic construct
  source 1..152: mol_type = other DNA
aatgttgttgatgcaaccataaagtgatatttaataattatttataatcagcaacttaaccacaaaacaaccataaattgatatctcacaaaacaaccataagttgatatttttgtgaatcgagtatttcagcaaaactactgcagtaagaa

SEQ ID NO: 3254 - DNA, 152 bp, synthetic construct
  source 1..152: mol_type = other DNA
aatgttgttgatgcaaccataaagtgatatttaataattatttataatcagcaacttaaccacaaaacaaccatagattgatatctcacaaaacaaccataagttgatatttttgtgaatcgagtatttcagcaaaactactgcagtaagaa

SEQ ID NO: 3255 - DNA, 152 bp, synthetic construct
  source 1..152: mol_type = other DNA
aatgttgttgatgcaaccataaagtgatatttaataattatttataatcagcaacttaaccacaaaacaaccatacattgatatctcacaaaacaaccataagttgatatttttgtgaatcgagtatttcagcaaaactactgcagtaagaa

SEQ ID NO: 3256 - DNA, 152 bp, synthetic construct
  source 1..152: mol_type = other DNA
aatgttgttgatgcaaccataaagtgatatttaataattatttataatcagcaacttaaccacaaaacaaccatttattgatatctcacaaaacaaccataagttgatatttttgtgaatcgagtatttcagcaaaactactgcagtaagaa

SEQ ID NO: 3257 - DNA, 152 bp, synthetic construct
  source 1..152: mol_type = other DNA
aatgttgttgatgcaaccataaagtgatatttaataattatttataatcagcaacttaaccacaaaacaaccatgtattgatatctcacaaaacaaccataagttgatatttttgtgaatcgagtatttcagcaaaactactgcagtaagaa

SEQ ID NO: 3258 - DNA, 152 bp, synthetic construct
  source 1..152: mol_type = other DNA
aatgttgttgatgcaaccataaagtgatatttaataattatttataatcagcaacttaaccacaaaacaaccatctattgatatctcacaaaacaaccataagttgatatttttgtgaatcgagtatttcagcaaaactactgcagtaagaa

SEQ ID NO: 3259 - DNA, 152 bp, synthetic construct
  source 1..152: mol_type = other DNA
aatgttgttgatgcaaccataaagtgatatttaataattatttataatcagcaacttaaccacaaaacaaccaaatattgatatctcacaaaacaaccataagttgatatttttgtgaatcgagtatttcagcaaaactactgcagtaagaa

SEQ ID NO: 3260 - DNA, 152 bp, synthetic construct
  source 1..152: mol_type = other DNA
aatgttgttgatgcaaccataaagtgatatttaataattatttataatcagcaacttaaccacaaaacaaccagatattgatatctcacaaaacaaccataagttgatatttttgtgaatcgagtatttcagcaaaactactgcagtaagaa

SEQ ID NO: 3261 - DNA, 152 bp, synthetic construct
  source 1..152: mol_type = other DNA
aatgttgttgatgcaaccataaagtgatatttaataattatttataatcagcaacttaaccacaaaacaaccacatattgatatctcacaaaacaaccataagttgatatttttgtgaatcgagtatttcagcaaaactactgcagtaagaa

SEQ ID NO: 3262 - DNA, 152 bp, synthetic construct
  source 1..152: mol_type = other DNA
aatgttgttgatgcaaccataaagtgatatttaataattatttataatcagcaacttaaccacaaaacaaccttatattgatatctcacaaaacaaccataagttgatatttttgtgaatcgagtatttcagcaaaactactgcagtaagaa

SEQ ID NO: 3263 - DNA, 152 bp, synthetic construct
  source 1..152: mol_type = other DNA
aatgttgttgatgcaaccataaagtgatatttaataattatttataatcagcaacttaaccacaaaacaaccgtatattgatatctcacaaaacaaccataagttgatatttttgtgaatcgagtatttcagcaaaactactgcagtaagaa

SEQ ID NO: 3264 - DNA, 152 bp, synthetic construct
  source 1..152: mol_type = other DNA
aatgttgttgatgcaaccataaagtgatatttaataattatttataatcagcaacttaaccacaaaacaaccctatattgatatctcacaaaacaaccataagttgatatttttgtgaatcgagtatttcagcaaaactactgcagtaagaa

SEQ ID NO: 3265 - DNA, 152 bp, synthetic construct
  source 1..152: mol_type = other DNA
aatgttgttgatgcaaccataaagtgatatttaataattatttataatcagcaacttaaccacaaaacaacaatatattgatatctcacaaaacaaccataagttgatatttttgtgaatcgagtatttcagcaaaactactgcagtaagaa

SEQ ID NO: 3266 - DNA, 152 bp, synthetic construct
  source 1..152: mol_type = other DNA
aatgttgttgatgcaaccataaagtgatatttaataattatttataatcagcaacttaaccacaaaacaactatatattgatatctcacaaaacaaccataagttgatatttttgtgaatcgagtatttcagcaaaactactgcagtaagaa

SEQ ID NO: 3267 - DNA, 152 bp, synthetic construct
  source 1..152: mol_type = other DNA
aatgttgttgatgcaaccataaagtgatatttaataattatttataatcagcaacttaaccacaaaacaacgatatattgatatctcacaaaacaaccataagttgatatttttgtgaatcgagtatttcagcaaaactactgcagtaagaa

SEQ ID NO: 3268 - DNA, 152 bp, synthetic construct
  source 1..152: mol_type = other DNA
aatgttgttgatgcaaccataaagtgatatttaataattatttataatcagcaacttaaccacaaaacaaacatatattgatatctcacaaaacaaccataagttgatatttttgtgaatcgagtatttcagcaaaactactgcagtaagaa

SEQ ID NO: 3269 - DNA, 152 bp, synthetic construct
  source 1..152: mol_type = other DNA
aatgttgttgatgcaaccataaagtgatatttaataattatttataatcagcaacttaaccacaaaacaatcatatattgatatctcacaaaacaaccataagttgatatttttgtgaatcgagtatttcagcaaaactactgcagtaagaa

SEQ ID NO: 3270 - DNA, 152 bp, synthetic construct
  source 1..152: mol_type = other DNA
aatgttgttgatgcaaccataaagtgatatttaataattatttataatcagcaacttaaccacaaaacaagcatatattgatatctcacaaaacaaccataagttgatatttttgtgaatcgagtatttcagcaaaactactgcagtaagaa

SEQ ID NO: 3271 - DNA, 152 bp, synthetic construct
  source 1..152: mol_type = other DNA
aatgttgttgatgcaaccataaagtgatatttaataattatttataatcagcaacttaaccacaaaacatccatatattgatatctcacaaaacaaccataagttgatatttttgtgaatcgagtatttcagcaaaactactgcagtaagaa

SEQ ID NO: 3272 - DNA, 152 bp, synthetic construct
  source 1..152: mol_type = other DNA
aatgttgttgatgcaaccataaagtgatatttaataattatttataatcagcaacttaaccacaaaacagccatatattgatatctcacaaaacaaccataagttgatatttttgtgaatcgagtatttcagcaaaactactgcagtaagaa

SEQ ID NO: 3273 - DNA, 152 bp, synthetic construct
  source 1..152: mol_type = other DNA
aatgttgttgatgcaaccataaagtgatatttaataattatttataatcagcaacttaaccacaaaacacccatatattgatatctcacaaaacaaccataagttgatatttttgtgaatcgagtatttcagcaaaactactgcagtaagaa

SEQ ID NO: 3274 - DNA, 152 bp, synthetic construct
  source 1..152: mol_type = other DNA
aatgttgttgatgcaaccataaagtgatatttaataattatttataatcagcaacttaaccacaaaactaccatatattgatatctcacaaaacaaccataagttgatatttttgtgaatcgagtatttcagcaaaactactgcagtaagaa

SEQ ID NO: 3275 - DNA, 152 bp, synthetic construct
  source 1..152: mol_type = other DNA
aatgttgttgatgcaaccataaagtgatatttaataattatttataatcagcaacttaaccacaaaacgaccatatattgatatctcacaaaacaaccataagttgatatttttgtgaatcgagtatttcagcaaaactactgcagtaagaa

SEQ ID NO: 3276 - DNA, 152 bp, synthetic construct
  source 1..152: mol_type = other DNA
aatgttgttgatgcaaccataaagtgatatttaataattatttataatcagcaacttaaccacaaaaccaccatatattgatatctcacaaaacaaccataagttgatatttttgtgaatcgagtatttcagcaaaactactgcagtaagaa

SEQ ID NO: 3277 - DNA, 152 bp, synthetic construct
  source 1..152: mol_type = other DNA
aatgttgttgatgcaaccataaagtgatatttaataattatttataatcagcaacttaaccacaaaaaaaccatatattgatatctcacaaaacaaccataagttgatatttttgtgaatcgagtatttcagcaaaactactgcagtaagaa

SEQ ID NO: 3278 - DNA, 152 bp, synthetic construct
  source 1..152: mol_type = other DNA
aatgttgttgatgcaaccataaagtgatatttaataattatttataatcagcaacttaaccacaaaataaccatatattgatatctcacaaaacaaccataagttgatatttttgtgaatcgagtatttcagcaaaactactgcagtaagaa

SEQ ID NO: 3279 - DNA, 152 bp, synthetic construct
  source 1..152: mol_type = other DNA
aatgttgttgatgcaaccataaagtgatatttaataattatttataatcagcaacttaaccacaaaagaaccatatattgatatctcacaaaacaaccataagttgatatttttgtgaatcgagtatttcagcaaaactactgcagtaagaa

SEQ ID NO: 3280 - DNA, 152 bp, synthetic construct
  source 1..152: mol_type = other DNA
aatgttgttgatgcaaccataaagtgatatttaataattatttataatcagcaacttaaccacaaatcaaccatatattgatatctcacaaaacaaccataagttgatatttttgtgaatcgagtatttcagcaaaactactgcagtaagaa

SEQ ID NO: 3281 - DNA, 152 bp, synthetic construct
  source 1..152: mol_type = other DNA
aatgttgttgatgcaaccataaagtgatatttaataattatttataatcagcaacttaaccacaaagcaaccatatattgatatctcacaaaacaaccataagttgatatttttgtgaatcgagtatttcagcaaaactactgcagtaagaa

SEQ ID NO: 3282 - DNA, 152 bp, synthetic construct
  source 1..152: mol_type = other DNA
aatgttgttgatgcaaccataaagtgatatttaataattatttataatcagcaacttaaccacaaaccaaccatatattgatatctcacaaaacaaccataagttgatatttttgtgaatcgagtatttcagcaaaactactgcagtaagaa

SEQ ID NO: 3283 - DNA, 152 bp, synthetic construct
  source 1..152: mol_type = other DNA
aatgttgttgatgcaaccataaagtgatatttaataattatttataatcagcaacttaaccacaatacaaccatatattgatatctcacaaaacaaccataagttgatatttttgtgaatcgagtatttcagcaaaactactgcagtaagaa

SEQ ID NO: 3284 - DNA, 152 bp, synthetic construct
  source 1..152: mol_type = other DNA
aatgttgttgatgcaaccataaagtgatatttaataattatttataatcagcaacttaaccacaagacaaccatatattgatatctcacaaaacaaccataagttgatatttttgtgaatcgagtatttcagcaaaactactgcagtaagaa

SEQ ID NO: 3285 - DNA, 152 bp, synthetic construct
  source 1..152: mol_type = other DNA
aatgttgttgatgcaaccataaagtgatatttaataattatttataatcagcaacttaaccacaacacaaccatatattgatatctcacaaaacaaccataagttgatatttttgtgaatcgagtatttcagcaaaactactgcagtaagaa

SEQ ID NO: 3286 - DNA, 152 bp, synthetic construct
  source 1..152: mol_type = other DNA
aatgttgttgatgcaaccataaagtgatatttaataattatttataatcagcaacttaaccacataacaaccatatattgatatctcacaaaacaaccataagttgatatttttgtgaatcgagtatttcagcaaaactactgcagtaagaa

SEQ ID NO: 3287 - DNA, 152 bp, synthetic construct
  source 1..152: mol_type = other DNA
aatgttgttgatgcaaccataaagtgatatttaataattatttataatcagcaacttaaccacagaacaaccatatattgatatctcacaaaacaaccataagttgatatttttgtgaatcgagtatttcagcaaaactactgcagtaagaa

SEQ ID NO: 3288 - DNA, 152 bp, synthetic construct
  source 1..152: mol_type = other DNA
aatgttgttgatgcaaccataaagtgatatttaataattatttataatcagcaacttaaccacacaacaaccatatattgatatctcacaaaacaaccataagttgatatttttgtgaatcgagtatttcagcaaaactactgcagtaagaa

SEQ ID NO: 3289 - DNA, 152 bp, synthetic construct
  source 1..152: mol_type = other DNA
aatgttgttgatgcaaccataaagtgatatttaataattatttataatcagcaacttaaccactaaacaaccatatattgatatctcacaaaacaaccataagttgatatttttgtgaatcgagtatttcagcaaaactactgcagtaagaa

SEQ ID NO: 3290 - DNA, 152 bp, synthetic construct
  source 1..152: mol_type = other DNA
aatgttgttgatgcaaccataaagtgatatttaataattatttataatcagcaacttaaccacgaaacaaccatatattgatatctcacaaaacaaccataagttgatatttttgtgaatcgagtatttcagcaaaactactgcagtaagaa

SEQ ID NO: 3291 - DNA, 152 bp, synthetic construct
  source 1..152: mol_type = other DNA
aatgttgttgatgcaaccataaagtgatatttaataattatttataatcagcaacttaaccaccaaacaaccatatattgatatctcacaaaacaaccataagttgatatttttgtgaatcgagtatttcagcaaaactactgcagtaagaa

SEQ ID NO: 3292 - DNA, 152 bp, synthetic construct
  source 1..152: mol_type = other DNA
aatgttgttgatgcaaccataaagtgatatttaataattatttataatcagcaacttaaccaaaaaacaaccatatattgatatctcacaaaacaaccataagttgatatttttgtgaatcgagtatttcagcaaaactactgcagtaagaa

SEQ ID NO: 3293 - DNA, 152 bp, synthetic construct
  source 1..152: mol_type = other DNA
aatgttgttgatgcaaccataaagtgatatttaataattatttataatcagcaacttaaccataaaacaaccatatattgatatctcacaaaacaaccataagttgatatttttgtgaatcgagtatttcagcaaaactactgcagtaagaa

SEQ ID NO: 3294 - DNA, 152 bp, synthetic construct
  source 1..152: mol_type = other DNA
aatgttgttgatgcaaccataaagtgatatttaataattatttataatcagcaacttaaccagaaaacaaccatatattgatatctcacaaaacaaccataagttgatatttttgtgaatcgagtatttcagcaaaactactgcagtaagaa

SEQ ID NO: 3295 - DNA, 152 bp, synthetic construct
  source 1..152: mol_type = other DNA
aatgttgttgatgcaaccataaagtgatatttaataattatttataatcagcaacttaacctcaaaacaaccatatattgatatctcacaaaacaaccataagttgatatttttgtgaatcgagtatttcagcaaaactactgcagtaagaa

SEQ ID NO: 3296 - DNA, 152 bp, synthetic construct
  source 1..152: mol_type = other DNA
aatgttgttgatgcaaccataaagtgatatttaataattatttataatcagcaacttaaccgcaaaacaaccatatattgatatctcacaaaacaaccataagttgatatttttgtgaatcgagtatttcagcaaaactactgcagtaagaa

SEQ ID NO: 3297 - DNA, 152 bp, synthetic construct
  source 1..152: mol_type = other DNA
aatgttgttgatgcaaccataaagtgatatttaataattatttataatcagcaacttaaccccaaaacaaccatatattgatatctcacaaaacaaccataagttgatatttttgtgaatcgagtatttcagcaaaactactgcagtaagaa

SEQ ID NO: 3298 - DNA, 152 bp, synthetic construct
  source 1..152: mol_type = other DNA
aatgttgttgatgcaaccataaagtgatatttaataattatttataatcagcaacttaacaacaaaacaaccatatattgatatctcacaaaacaaccataagttgatatttttgtgaatcgagtatttcagcaaaactactgcagtaagaa

SEQ ID NO: 3299 - DNA, 152 bp, synthetic construct
  source 1..152: mol_type = other DNA
aatgttgttgatgcaaccataaagtgatatttaataattatttataatcagcaacttaactacaaaacaaccatatattgatatctcacaaaacaaccataagttgatatttttgtgaatcgagtatttcagcaaaactactgcagtaagaa

SEQ ID NO: 3300 - DNA, 152 bp, synthetic construct
  source 1..152: mol_type = other DNA
aatgttgttgatgcaaccataaagtgatatttaataattatttataatcagcaacttaacgacaaaacaaccatatattgatatctcacaaaacaaccataagttgatatttttgtgaatcgagtatttcagcaaaactactgcagtaagaa

SEQ ID NO: 3301 - DNA, 152 bp, synthetic construct
  source 1..152: mol_type = other DNA
aatgttgttgatgcaaccataaagtgatatttaataattatttataatcagcaacttaaacacaaaacaaccatatattgatatctcacaaaacaaccataagttgatatttttgtgaatcgagtatttcagcaaaactactgcagtaagaa

SEQ ID NO: 3302 - DNA, 152 bp, synthetic construct
  source 1..152: mol_type = other DNA
aatgttgttgatgcaaccataaagtgatatttaataattatttataatcagcaacttaatcacaaaacaaccatatattgatatctcacaaaacaaccataagttgatatttttgtgaatcgagtatttcagcaaaactactgcagtaagaa

SEQ ID NO: 3303 - DNA, 152 bp, synthetic construct
  source 1..152: mol_type = other DNA
aatgttgttgatgcaaccataaagtgatatttaataattatttataatcagcaacttaagcacaaaacaaccatatattgatatctcacaaaacaaccataagttgatatttttgtgaatcgagtatttcagcaaaactactgcagtaagaa

SEQ ID NO: 3304 - DNA, 152 bp, synthetic construct
  source 1..152: mol_type = other DNA
aatgttgttgatgcaaccataaagtgatatttaataattatttataatcagcaacttatccacaaaacaaccatatattgatatctcacaaaacaaccataagttgatatttttgtgaatcgagtatttcagcaaaactactgcagtaagaa

SEQ ID NO: 3305 - DNA, 152 bp, synthetic construct
  source 1..152: mol_type = other DNA
aatgttgttgatgcaaccataaagtgatatttaataattatttataatcagcaacttagccacaaaacaaccatatattgatatctcacaaaacaaccataagttgatatttttgtgaatcgagtatttcagcaaaactactgcagtaagaa

SEQ ID NO: 3306 - DNA, 152 bp, synthetic construct
  source 1..152: mol_type = other DNA
aatgttgttgatgcaaccataaagtgatatttaataattatttataatcagcaacttacccacaaaacaaccatatattgatatctcacaaaacaaccataagttgatatttttgtgaatcgagtatttcagcaaaactactgcagtaagaa

SEQ ID NO: 3307 - DNA, 152 bp, synthetic construct
  source 1..152: mol_type = other DNA
aatgttgttgatgcaaccataaagtgatatttaataattatttataatcagcaactttaccacaaaacaaccatatattgatatctcacaaaacaaccataagttgatatttttgtgaatcgagtatttcagcaaaactactgcagtaagaa

SEQ ID NO: 3308 - DNA, 152 bp, synthetic construct
  source 1..152: mol_type = other DNA
aatgttgttgatgcaaccataaagtgatatttaataattatttataatcagcaacttgaccacaaaacaaccatatattgatatctcacaaaacaaccataagttgatatttttgtgaatcgagtatttcagcaaaactactgcagtaagaa

SEQ ID NO: 3309 - DNA, 152 bp, synthetic construct
  source 1..152: mol_type = other DNA
aatgttgttgatgcaaccataaagtgatatttaataattatttataatcagcaacttcaccacaaaacaaccatatattgatatctcacaaaacaaccataagttgatatttttgtgaatcgagtatttcagcaaaactactgcagtaagaa

SEQ ID NO: 3310 - DNA, 152 bp, synthetic construct
  source 1..152: mol_type = other DNA
aatgttgttgatgcaaccataaagtgatatttaataattatttataatcagcaactaaaccacaaaacaaccatatattgatatctcacaaaacaaccataagttgatatttttgtgaatcgagtatttcagcaaaactactgcagtaagaa

SEQ ID NO: 3311 - DNA, 152 bp, synthetic construct
  source 1..152: mol_type = other DNA
aatgttgttgatgcaaccataaagtgatatttaataattatttataatcagcaactgaaccacaaaacaaccatatattgatatctcacaaaacaaccataagttgatatttttgtgaatcgagtatttcagcaaaactactgcagtaagaa

SEQ ID NO: 3312 - DNA, 152 bp, synthetic construct
  source 1..152: mol_type = other DNA
aatgttgttgatgcaaccataaagtgatatttaataattatttataatcagcaactcaaccacaaaacaaccatatattgatatctcacaaaacaaccataagttgatatttttgtgaatcgagtatttcagcaaaactactgcagtaagaa

SEQ ID NO: 3313 - DNA, 152 bp, synthetic construct
  source 1..152: mol_type = other DNA
aatgttgttgatgcaaccataaagtgatatttaataattatttataatcagcaacataaccacaaaacaaccatatattgatatctcacaaaacaaccataagttgatatttttgtgaatcgagtatttcagcaaaactactgcagtaagaa

SEQ ID NO: 3314 - DNA, 152 bp, synthetic construct
  source 1..152: mol_type = other DNA
aatgttgttgatgcaaccataaagtgatatttaataattatttataatcagcaacgtaaccacaaaacaaccatatattgatatctcacaaaacaaccataagttgatatttttgtgaatcgagtatttcagcaaaactactgcagtaagaa

SEQ ID NO: 3315 - DNA, 152 bp, synthetic construct
  source 1..152: mol_type = other DNA
aatgttgttgatgcaaccataaagtgatatttaataattatttataatcagcaacctaaccacaaaacaaccatatattgatatctcacaaaacaaccataagttgatatttttgtgaatcgagtatttcagcaaaactactgcagtaagaa

SEQ ID NO: 3316 - DNA, 152 bp, synthetic construct
  source 1..152: mol_type = other DNA
aatgttgttgatgcaaccataaagtgatatttaataattatttataatcagcaaattaaccacaaaacaaccatatattgatatctcacaaaacaaccataagttgatatttttgtgaatcgagtatttcagcaaaactactgcagtaagaa

SEQ ID NO: 3317 - DNA, 152 bp, synthetic construct
  source 1..152: mol_type = other DNA
aatgttgttgatgcaaccataaagtgatatttaataattatttataatcagcaatttaaccacaaaacaaccatatattgatatctcacaaaacaaccataagttgatatttttgtgaatcgagtatttcagcaaaactactgcagtaagaa

SEQ ID NO: 3318 - DNA, 152 bp, synthetic construct
  source 1..152: mol_type = other DNA
aatgttgttgatgcaaccataaagtgatatttaataattatttataatcagcaagttaaccacaaaacaaccatatattgatatctcacaaaacaaccataagttgatatttttgtgaatcgagtatttcagcaaaactactgcagtaagaa

SEQ ID NO: 3319 - DNA, 152 bp, synthetic construct
  source 1..152: mol_type = other DNA
aatgttgttgatgcaaccataaagtgatatttaataattatttataatcagcatcttaaccacaaaacaaccatatattgatatctcacaaaacaaccataagttgatatttttgtgaatcgagtatttcagcaaaactactgcagtaagaa

SEQ ID NO: 3320 - DNA, 152 bp, synthetic construct
  source 1..152: mol_type = other DNA
aatgttgttgatgcaaccataaagtgatatttaataattatttataatcagcagcttaaccacaaaacaaccatatattgatatctcacaaaacaaccataagttgatatttttgtgaatcgagtatttcagcaaaactactgcagtaagaa

SEQ ID NO: 3321 - DNA, 152 bp, synthetic construct
  source 1..152: mol_type = other DNA
aatgttgttgatgcaaccataaagtgatatttaataattatttataatcagcaccttaaccacaaaacaaccatatattgatatctcacaaaacaaccataagttgatatttttgtgaatcgagtatttcagcaaaactactgcagtaagaa

SEQ ID NO: 3322 - DNA, 152 bp, synthetic construct
  source 1..152: mol_type = other DNA
aatgttgttgatgcaaccataaagtgatatttaataattatttataatcagctacttaaccacaaaacaaccatatattgatatctcacaaaacaaccataagttgatatttttgtgaatcgagtatttcagcaaaactactgcagtaagaa

SEQ ID NO: 3323 - DNA, 152 bp, synthetic construct
  source 1..152: mol_type = other DNA
aatgttgttgatgcaaccataaagtgatatttaataattatttataatcagcgacttaaccacaaaacaaccatatattgatatctcacaaaacaaccataagttgatatttttgtgaatcgagtatttcagcaaaactactgcagtaagaa

SEQ ID NO: 3324 - DNA, 152 bp, synthetic construct
  source 1..152: mol_type = other DNA
aatgttgttgatgcaaccataaagtgatatttaataattatttataatcagccacttaaccacaaaacaaccatatattgatatctcacaaaacaaccataagttgatatttttgtgaatcgagtatttcagcaaaactactgcagtaagaa

SEQ ID NO: 3325 - DNA, 152 bp, synthetic construct
  source 1..152: mol_type = other DNA
aatgttgttgatgcaaccataaagtgatatttaataattatttataatcagaaacttaaccacaaaacaaccatatattgatatctcacaaaacaaccataagttgatatttttgtgaatcgagtatttcagcaaaactactgcagtaagaa

SEQ ID NO: 3326 - DNA, 152 bp, synthetic construct
  source 1..152: mol_type = other DNA
aatgttgttgatgcaaccataaagtgatatttaataattatttataatcagtaacttaaccacaaaacaaccatatattgatatctcacaaaacaaccataagttgatatttttgtgaatcgagtatttcagcaaaactactgcagtaagaa

SEQ ID NO: 3327 - DNA, 152 bp, synthetic construct
  source 1..152: mol_type = other DNA
aatgttgttgatgcaaccataaagtgatatttaataattatttataatcaggaacttaaccacaaaacaaccatatattgatatctcacaaaacaaccataagttgatatttttgtgaatcgagtatttcagcaaaactactgcagtaagaa

SEQ ID NO: 3328 - DNA, 152 bp, synthetic construct
  source 1..152: mol_type = other DNA
aatgttgttgatgcaaccataaagtgatatttaataattatttataatcaacaacttaaccacaaaacaaccatatattgatatctcacaaaacaaccataagttgatatttttgtgaatcgagtatttcagcaaaactactgcagtaagaa

SEQ ID NO: 3329 - DNA, 152 bp, synthetic construct
  source 1..152: mol_type = other DNA
aatgttgttgatgcaaccataaagtgatatttaataattatttataatcatcaacttaaccacaaaacaaccatatattgatatctcacaaaacaaccataagttgatatttttgtgaatcgagtatttcagcaaaactactgcagtaagaa

SEQ ID NO: 3330 - DNA, 152 bp, synthetic construct
  source 1..152: mol_type = other DNA
aatgttgttgatgcaaccataaagtgatatttaataattatttataatcaccaacttaaccacaaaacaaccatatattgatatctcacaaaacaaccataagttgatatttttgtgaatcgagtatttcagcaaaactactgcagtaagaa

SEQ ID NO: 3331 - DNA, 152 bp, synthetic construct
  source 1..152: mol_type = other DNA
aatgttgttgatgcaaccataaagtgatatttaataattatttataatctgcaacttaaccacaaaacaaccatatattgatatctcacaaaacaaccataagttgatatttttgtgaatcgagtatttcagcaaaactactgcagtaagaa

SEQ ID NO: 3332 - DNA, 152 bp, synthetic construct
  source 1..152: mol_type = other DNA
aatgttgttgatgcaaccataaagtgatatttaataattatttataatcggcaacttaaccacaaaacaaccatatattgatatctcacaaaacaaccataagttgatatttttgtgaatcgagtatttcagcaaaactactgcagtaagaa

SEQ ID NO: 3333 - DNA, 152 bp, synthetic construct
  source 1..152: mol_type = other DNA
aatgttgttgatgcaaccataaagtgatatttaataattatttataatccgcaacttaaccacaaaacaaccatatattgatatctcacaaaacaaccataagttgatatttttgtgaatcgagtatttcagcaaaactactgcagtaagaa

SEQ ID NO: 3334 - DNA, 152 bp, synthetic construct
  source 1..152: mol_type = other DNA
aatgttgttgatgcaaccataaagtgatatttaataattatttataataagcaacttaaccacaaaacaaccatatattgatatctcacaaaacaaccataagttgatatttttgtgaatcgagtatttcagcaaaactactgcagtaagaa

SEQ ID NO: 3335 - DNA, 152 bp, synthetic construct
  source 1..152: mol_type = other DNA
aatgttgttgatgcaaccataaagtgatatttaataattatttataattagcaacttaaccacaaaacaaccatatattgatatctcacaaaacaaccataagttgatatttttgtgaatcgagtatttcagcaaaactactgcagtaagaa

SEQ ID NO: 3336 - DNA, 152 bp, synthetic construct
  source 1..152: mol_type = other DNA
aatgttgttgatgcaaccataaagtgatatttaataattatttataatgagcaacttaaccacaaaacaaccatatattgatatctcacaaaacaaccataagttgatatttttgtgaatcgagtatttcagcaaaactactgcagtaagaa

SEQ ID NO: 3337 - DNA, 152 bp, synthetic construct
  source 1..152: mol_type = other DNA
aatgttgttgatgcaaccataaagtgatatttaataattatttataaacagcaacttaaccacaaaacaaccatatattgatatctcacaaaacaaccataagttgatatttttgtgaatcgagtatttcagcaaaactactgcagtaagaa

SEQ ID NO: 3338 - DNA, 152 bp, synthetic construct
  source 1..152: mol_type = other DNA
aatgttgttgatgcaaccataaagtgatatttaataattatttataagcagcaacttaaccacaaaacaaccatatattgatatctcacaaaacaaccataagttgatatttttgtgaatcgagtatttcagcaaaactactgcagtaagaa

SEQ ID NO: 3339 - DNA, 152 bp, synthetic construct
  source 1..152: mol_type = other DNA
aatgttgttgatgcaaccataaagtgatatttaataattatttataaccagcaacttaaccacaaaacaaccatatattgatatctcacaaaacaaccataagttgatatttttgtgaatcgagtatttcagcaaaactactgcagtaagaa

SEQ ID NO: 3340 - DNA, 152 bp, synthetic construct
  source 1..152: mol_type = other DNA
aatgttgttgatgcaaccataaagtgatatttaataattatttatattcagcaacttaaccacaaaacaaccatatattgatatctcacaaaacaaccataagttgatatttttgtgaatcgagtatttcagcaaaactactgcagtaagaa

SEQ ID NO: 3341 - DNA, 152 bp, synthetic construct
  source 1..152: mol_type = other DNA
aatgttgttgatgcaaccataaagtgatatttaataattatttatagtcagcaacttaaccacaaaacaaccatatattgatatctcacaaaacaaccataagttgatatttttgtgaatcgagtatttcagcaaaactactgcagtaagaa

SEQ ID NO: 3342 - DNA, 152 bp, synthetic construct
  source 1..152: mol_type = other DNA
aatgttgttgatgcaaccataaagtgatatttaataattatttatactcagcaacttaaccacaaaacaaccatatattgatatctcacaaaacaaccataagttgatatttttgtgaatcgagtatttcagcaaaactactgcagtaagaa

SEQ ID NO: 3343 - DNA, 152 bp, synthetic construct
  source 1..152: mol_type = other DNA
aatgttgttgatgcaaccataaagtgatatttaataattatttattatcagcaacttaaccacaaaacaaccatatattgatatctcacaaaacaaccataagttgatatttttgtgaatcgagtatttcagcaaaactactgcagtaagaa

SEQ ID NO: 3344 - DNA, 152 bp, synthetic construct
  source 1..152: mol_type = other DNA
aatgttgttgatgcaaccataaagtgatatttaataattatttatgatcagcaacttaaccacaaaacaaccatatattgatatctcacaaaacaaccataagttgatatttttgtgaatcgagtatttcagcaaaactactgcagtaagaa

SEQ ID NO: 3345 - DNA, 152 bp, synthetic construct
  source 1..152: mol_type = other DNA
aatgttgttgatgcaaccataaagtgatatttaataattatttatcatcagcaacttaaccacaaaacaaccatatattgatatctcacaaaacaaccataagttgatatttttgtgaatcgagtatttcagcaaaactactgcagtaagaa

SEQ ID NO: 3346 - DNA, 152 bp, synthetic construct
  source 1..152: mol_type = other DNA
aatgttgttgatgcaaccataaagtgatatttaataattatttaaaatcagcaacttaaccacaaaacaaccatatattgatatctcacaaaacaaccataagttgatatttttgtgaatcgagtatttcagcaaaactactgcagtaagaa

SEQ ID NO: 3347 - DNA, 152 bp, synthetic construct
  source 1..152: mol_type = other DNA
aatgttgttgatgcaaccataaagtgatatttaataattatttagaatcagcaacttaaccacaaaacaaccatatattgatatctcacaaaacaaccataagttgatatttttgtgaatcgagtatttcagcaaaactactgcagtaagaa

SEQ ID NO: 3348 - DNA, 152 bp, synthetic construct
  source 1..152: mol_type = other DNA
aatgttgttgatgcaaccataaagtgatatttaataattatttacaatcagcaacttaaccacaaaacaaccatatattgatatctcacaaaacaaccataagttgatatttttgtgaatcgagtatttcagcaaaactactgcagtaagaa

SEQ ID NO: 3349 - DNA, 152 bp, synthetic construct
  source 1..152: mol_type = other DNA
aatgttgttgatgcaaccataaagtgatatttaataattatttttaatcagcaacttaaccacaaaacaaccatatattgatatctcacaaaacaaccataagttgatatttttgtgaatcgagtatttcagcaaaactactgcagtaagaa

SEQ ID NO: 3350 - DNA, 152 bp, synthetic construct
  source 1..152: mol_type = other DNA
aatgttgttgatgcaaccataaagtgatatttaataattatttgtaatcagcaacttaaccacaaaacaaccatatattgatatctcacaaaacaaccataagttgatatttttgtgaatcgagtatttcagcaaaactactgcagtaagaa

SEQ ID NO: 3351 - DNA, 152 bp, synthetic construct
  source 1..152: mol_type = other DNA
aatgttgttgatgcaaccataaagtgatatttaataattatttctaatcagcaacttaaccacaaaacaaccatatattgatatctcacaaaacaaccataagttgatatttttgtgaatcgagtatttcagcaaaactactgcagtaagaa

SEQ ID NO: 3352 - DNA, 152 bp, synthetic construct
  source 1..152: mol_type = other DNA
aatgttgttgatgcaaccataaagtgatatttaataattattaataatcagcaacttaaccacaaaacaaccatatattgatatctcacaaaacaaccataagttgatatttttgtgaatcgagtatttcagcaaaactactgcagtaagaa

SEQ ID NO: 3353 - DNA, 152 bp, synthetic construct
  source 1..152: mol_type = other DNA
aatgttgttgatgcaaccataaagtgatatttaataattattgataatcagcaacttaaccacaaaacaaccatatattgatatctcacaaaacaaccataagttgatatttttgtgaatcgagtatttcagcaaaactactgcagtaagaa

SEQ ID NO: 3354 - DNA, 152 bp, synthetic construct
  source 1..152: mol_type = other DNA
aatgttgttgatgcaaccataaagtgatatttaataattattcataatcagcaacttaaccacaaaacaaccatatattgatatctcacaaaacaaccataagttgatatttttgtgaatcgagtatttcagcaaaactactgcagtaagaa

SEQ ID NO: 3355 - DNA, 152 bp, synthetic construct
  source 1..152: mol_type = other DNA
aatgttgttgatgcaaccataaagtgatatttaataattatatataatcagcaacttaaccacaaaacaaccatatattgatatctcacaaaacaaccataagttgatatttttgtgaatcgagtatttcagcaaaactactgcagtaagaa

SEQ ID NO: 3356 - DNA, 152 bp, synthetic construct
  source 1..152: mol_type = other DNA
aatgttgttgatgcaaccataaagtgatatttaataattatgtataatcagcaacttaaccacaaaacaaccatatattgatatctcacaaaacaaccataagttgatatttttgtgaatcgagtatttcagcaaaactactgcagtaagaa

SEQ ID NO: 3357 - DNA, 152 bp, synthetic construct
  source 1..152: mol_type = other DNA
aatgttgttgatgcaaccataaagtgatatttaataattatctataatcagcaacttaaccacaaaacaaccatatattgatatctcacaaaacaaccataagttgatatttttgtgaatcgagtatttcagcaaaactactgcagtaagaa

SEQ ID NO: 3358 - DNA, 152 bp, synthetic construct
  source 1..152: mol_type = other DNA
aatgttgttgatgcaaccataaagtgatatttaataattaattataatcagcaacttaaccacaaaacaaccatatattgatatctcacaaaacaaccataagttgatatttttgtgaatcgagtatttcagcaaaactactgcagtaagaa

SEQ ID NO: 3359 - DNA, 152 bp, synthetic construct
  source 1..152: mol_type = other DNA
aatgttgttgatgcaaccataaagtgatatttaataattagttataatcagcaacttaaccacaaaacaaccatatattgatatctcacaaaacaaccataagttgatatttttgtgaatcgagtatttcagcaaaactactgcagtaagaa

SEQ ID NO: 3360 - DNA, 152 bp, synthetic construct
  source 1..152: mol_type = other DNA
aatgttgttgatgcaaccataaagtgatatttaataattacttataatcagcaacttaaccacaaaacaaccatatattgatatctcacaaaacaaccataagttgatatttttgtgaatcgagtatttcagcaaaactactgcagtaagaa

SEQ ID NO: 3361 - DNA, 152 bp, synthetic construct
  source 1..152: mol_type = other DNA
aatgttgttgatgcaaccataaagtgatatttaataattttttataatcagcaacttaaccacaaaacaaccatatattgatatctcacaaaacaaccataagttgatatttttgtgaatcgagtatttcagcaaaactactgcagtaagaa

SEQ ID NO: 3362 - DNA, 152 bp, synthetic construct
  source 1..152: mol_type = other DNA
aatgttgttgatgcaaccataaagtgatatttaataattgtttataatcagcaacttaaccacaaaacaaccatatattgatatctcacaaaacaaccataagttgatatttttgtgaatcgagtatttcagcaaaactactgcagtaagaa

SEQ ID NO: 3363 - DNA, 152 bp, synthetic construct
  source 1..152: mol_type = other DNA
aatgttgttgatgcaaccataaagtgatatttaataattctttataatcagcaacttaaccacaaaacaaccatatattgatatctcacaaaacaaccataagttgatatttttgtgaatcgagtatttcagcaaaactactgcagtaagaa

SEQ ID NO: 3364 - DNA, 152 bp, synthetic construct
  source 1..152: mol_type = other DNA
aatgttgttgatgcaaccataaagtgatatttaataataatttataatcagcaacttaaccacaaaacaaccatatattgatatctcacaaaacaaccataagttgatatttttgtgaatcgagtatttcagcaaaactactgcagtaagaa

SEQ ID NO: 3365 - DNA, 152 bp, synthetic construct
  source 1..152: mol_type = other DNA
aatgttgttgatgcaaccataaagtgatatttaataatgatttataatcagcaacttaaccacaaaacaaccatatattgatatctcacaaaacaaccataagttgatatttttgtgaatcgagtatttcagcaaaactactgcagtaagaa

SEQ ID NO: 3366 - DNA, 152 bp, synthetic construct
  source 1..152: mol_type = other DNA
aatgttgttgatgcaaccataaagtgatatttaataatcatttataatcagcaacttaaccacaaaacaaccatatattgatatctcacaaaacaaccataagttgatatttttgtgaatcgagtatttcagcaaaactactgcagtaagaa

SEQ ID NO: 3367 - DNA, 152 bp, synthetic construct
  source 1..152: mol_type = other DNA
aatgttgttgatgcaaccataaagtgatatttaataaatatttataatcagcaacttaaccacaaaacaaccatatattgatatctcacaaaacaaccataagttgatatttttgtgaatcgagtatttcagcaaaactactgcagtaagaa

SEQ ID NO: 3368 - DNA, 152 bp, synthetic construct
  source 1..152: mol_type = other DNA
aatgttgttgatgcaaccataaagtgatatttaataagtatttataatcagcaacttaaccacaaaacaaccatatattgatatctcacaaaacaaccataagttgatatttttgtgaatcgagtatttcagcaaaactactgcagtaagaa

SEQ ID NO: 3369 - DNA, 152 bp, synthetic construct
  source 1..152: mol_type = other DNA
aatgttgttgatgcaaccataaagtgatatttaataactatttataatcagcaacttaaccacaaaacaaccatatattgatatctcacaaaacaaccataagttgatatttttgtgaatcgagtatttcagcaaaactactgcagtaagaa

SEQ ID NO: 3370 - DNA, 152 bp, synthetic construct
  source 1..152: mol_type = other DNA
aatgttgttgatgcaaccataaagtgatatttaatatttatttataatcagcaacttaaccacaaaacaaccatatattgatatctcacaaaacaaccataagttgatatttttgtgaatcgagtatttcagcaaaactactgcagtaagaa

SEQ ID NO: 3371 - DNA, 152 bp, synthetic construct
  source 1..152: mol_type = other DNA
aatgttgttgatgcaaccataaagtgatatttaatagttatttataatcagcaacttaaccacaaaacaaccatatattgatatctcacaaaacaaccataagttgatatttttgtgaatcgagtatttcagcaaaactactgcagtaagaa

SEQ ID NO: 3372 - DNA, 152 bp, synthetic construct
  source 1..152: mol_type = other DNA
aatgttgttgatgcaaccataaagtgatatttaatacttatttataatcagcaacttaaccacaaaacaaccatatattgatatctcacaaaacaaccataagttgatatttttgtgaatcgagtatttcagcaaaactactgcagtaagaa

SEQ ID NO: 3373 - DNA, 152 bp, synthetic construct
  source 1..152: mol_type = other DNA
aatgttgttgatgcaaccataaagtgatatttaattattatttataatcagcaacttaaccacaaaacaaccatatattgatatctcacaaaacaaccataagttgatatttttgtgaatcgagtatttcagcaaaactactgcagtaagaa

SEQ ID NO: 3374 - DNA, 152 bp, synthetic construct
  source 1..152: mol_type = other DNA
aatgttgttgatgcaaccataaagtgatatttaatgattatttataatcagcaacttaaccacaaaacaaccatatattgatatctcacaaaacaaccataagttgatatttttgtgaatcgagtatttcagcaaaactactgcagtaagaa

SEQ ID NO: 3375 - DNA, 152 bp, synthetic construct
  source 1..152: mol_type = other DNA
aatgttgttgatgcaaccataaagtgatatttaatcattatttataatcagcaacttaaccacaaaacaaccatatattgatatctcacaaaacaaccataagttgatatttttgtgaatcgagtatttcagcaaaactactgcagtaagaa

SEQ ID NO: 3376 - DNA, 152 bp, synthetic construct
  source 1..152: mol_type = other DNA
aatgttgttgatgcaaccataaagtgatatttaaaaattatttataatcagcaacttaaccacaaaacaaccatatattgatatctcacaaaacaaccataagttgatatttttgtgaatcgagtatttcagcaaaactactgcagtaagaa

SEQ ID NO: 3377 - DNA, 152 bp, synthetic construct
  source 1..152: mol_type = other DNA
aatgttgttgatgcaaccataaagtgatatttaagaattatttataatcagcaacttaaccacaaaacaaccatatattgatatctcacaaaacaaccataagttgatatttttgtgaatcgagtatttcagcaaaactactgcagtaagaa

SEQ ID NO: 3378 - DNA, 152 bp, synthetic construct
  source 1..152: mol_type = other DNA
aatgttgttgatgcaaccataaagtgatatttaacaattatttataatcagcaacttaaccacaaaacaaccatatattgatatctcacaaaacaaccataagttgatatttttgtgaatcgagtatttcagcaaaactactgcagtaagaa

SEQ ID NO: 3379 - DNA, 152 bp, synthetic construct
  source 1..152: mol_type = other DNA
aatgttgttgatgcaaccataaagtgatatttattaattatttataatcagcaacttaaccacaaaacaaccatatattgatatctcacaaaacaaccataagttgatatttttgtgaatcgagtatttcagcaaaactactgcagtaagaa

SEQ ID NO: 3380 - DNA, 152 bp, synthetic construct
  source 1..152: mol_type = other DNA
aatgttgttgatgcaaccataaagtgatatttagtaattatttataatcagcaacttaaccacaaaacaaccatatattgatatctcacaaaacaaccataagttgatatttttgtgaatcgagtatttcagcaaaactactgcagtaagaa

SEQ ID NO: 3381 - DNA, 152 bp, synthetic construct
  source 1..152: mol_type = other DNA
aatgttgttgatgcaaccataaagtgatatttactaattatttataatcagcaacttaaccacaaaacaaccatatattgatatctcacaaaacaaccataagttgatatttttgtgaatcgagtatttcagcaaaactactgcagtaagaa

SEQ ID NO: 3382 - DNA, 152 bp, synthetic construct
  source 1..152: mol_type = other DNA
aatgttgttgatgcaaccataaagtgatattttataattatttataatcagcaacttaaccacaaaacaaccatatattgatatctcacaaaacaaccataagttgatatttttgtgaatcgagtatttcagcaaaactactgcagtaagaa

SEQ ID NO: 3383 - DNA, 152 bp, synthetic construct
  source 1..152: mol_type = other DNA
aatgttgttgatgcaaccataaagtgatatttgataattatttataatcagcaacttaaccacaaaacaaccatatattgatatctcacaaaacaaccataagttgatatttttgtgaatcgagtatttcagcaaaactactgcagtaagaa

SEQ ID NO: 3384 - DNA, 152 bp, synthetic construct
  source 1..152: mol_type = other DNA
aatgttgttgatgcaaccataaagtgatatttcataattatttataatcagcaacttaaccacaaaacaaccatatattgatatctcacaaaacaaccataagttgatatttttgtgaatcgagtatttcagcaaaactactgcagtaagaa

SEQ ID NO: 3385 - DNA, 152 bp, synthetic construct
  source 1..152: mol_type = other DNA
aatgttgttgatgcaaccataaagtgatattaaataattatttataatcagcaacttaaccacaaaacaaccatatattgatatctcacaaaacaaccataagttgatatttttgtgaatcgagtatttcagcaaaactactgcagtaagaa

SEQ ID NO: 3386 - DNA, 152 bp, synthetic construct
  source 1..152: mol_type = other DNA
aatgttgttgatgcaaccataaagtgatattgaataattatttataatcagcaacttaaccacaaaacaaccatatattgatatctcacaaaacaaccataagttgatatttttgtgaatcgagtatttcagcaaaactactgcagtaagaa

SEQ ID NO: 3387 - DNA, 152 bp, synthetic construct
  source 1..152: mol_type = other DNA
aatgttgttgatgcaaccataaagtgatattcaataattatttataatcagcaacttaaccacaaaacaaccatatattgatatctcacaaaacaaccataagttgatatttttgtgaatcgagtatttcagcaaaactactgcagtaagaa

SEQ ID NO: 3388 - DNA, 152 bp, synthetic construct
  source 1..152: mol_type = other DNA
aatgttgttgatgcaaccataaagtgatatataataattatttataatcagcaacttaaccacaaaacaaccatatattgatatctcacaaaacaaccataagttgatatttttgtgaatcgagtatttcagcaaaactactgcagtaagaa

SEQ ID NO: 3389 - DNA, 152 bp, synthetic construct
  source 1..152: mol_type = other DNA
aatgttgttgatgcaaccataaagtgatatgtaataattatttataatcagcaacttaaccacaaaacaaccatatattgatatctcacaaaacaaccataagttgatatttttgtgaatcgagtatttcagcaaaactactgcagtaagaa

SEQ ID NO: 3390 - DNA, 152 bp, synthetic construct
  source 1..152: mol_type = other DNA
aatgttgttgatgcaaccataaagtgatatctaataattatttataatcagcaacttaaccacaaaacaaccatatattgatatctcacaaaacaaccataagttgatatttttgtgaatcgagtatttcagcaaaactactgcagtaagaa

SEQ ID NO: 3391 - DNA, 152 bp, synthetic construct
  source 1..152: mol_type = other DNA
aatgttgttgatgcaaccataaagtgataattaataattatttataatcagcaacttaaccacaaaacaaccatatattgatatctcacaaaacaaccataagttgatatttttgtgaatcgagtatttcagcaaaactactgcagtaagaa

SEQ ID NO: 3392 - DNA, 152 bp, synthetic construct
  source 1..152: mol_type = other DNA
aatgttgttgatgcaaccataaagtgatagttaataattatttataatcagcaacttaaccacaaaacaaccatatattgatatctcacaaaacaaccataagttgatatttttgtgaatcgagtatttcagcaaaactactgcagtaagaa

SEQ ID NO: 3393 - DNA, 152 bp, synthetic construct
  source 1..152: mol_type = other DNA
aatgttgttgatgcaaccataaagtgatacttaataattatttataatcagcaacttaaccacaaaacaaccatatattgatatctcacaaaacaaccataagttgatatttttgtgaatcgagtatttcagcaaaactactgcagtaagaa

SEQ ID NO: 3394 - DNA, 152 bp, synthetic construct
  source 1..152: mol_type = other DNA
aatgttgttgatgcaaccataaagtgatttttaataattatttataatcagcaacttaaccacaaaacaaccatatattgatatctcacaaaacaaccataagttgatatttttgtgaatcgagtatttcagcaaaactactgcagtaagaa

SEQ ID NO: 3395 - DNA, 152 bp, synthetic construct
  source 1..152: mol_type = other DNA
aatgttgttgatgcaaccataaagtgatgtttaataattatttataatcagcaacttaaccacaaaacaaccatatattgatatctcacaaaacaaccataagttgatatttttgtgaatcgagtatttcagcaaaactactgcagtaagaa

SEQ ID NO: 3396 - DNA, 152 bp, synthetic construct
  source 1..152: mol_type = other DNA
aatgttgttgatgcaaccataaagtgatctttaataattatttataatcagcaacttaaccacaaaacaaccatatattgatatctcacaaaacaaccataagttgatatttttgtgaatcgagtatttcagcaaaactactgcagtaagaa

SEQ ID NO: 3397 - DNA, 152 bp, synthetic construct
  source 1..152: mol_type = other DNA
aatgttgttgatgcaaccataaagtgaaatttaataattatttataatcagcaacttaaccacaaaacaaccatatattgatatctcacaaaacaaccataagttgatatttttgtgaatcgagtatttcagcaaaactactgcagtaagaa

SEQ ID NO: 3398 - DNA, 152 bp, synthetic construct
  source 1..152: mol_type = other DNA
aatgttgttgatgcaaccataaagtgagatttaataattatttataatcagcaacttaaccacaaaacaaccatatattgatatctcacaaaacaaccataagttgatatttttgtgaatcgagtatttcagcaaaactactgcagtaagaa

SEQ ID NO: 3399 - DNA, 152 bp, synthetic construct
  source 1..152: mol_type = other DNA
aatgttgttgatgcaaccataaagtgacatttaataattatttataatcagcaacttaaccacaaaacaaccatatattgatatctcacaaaacaaccataagttgatatttttgtgaatcgagtatttcagcaaaactactgcagtaagaa

SEQ ID NO: 3400 - DNA, 152 bp, synthetic construct
  source 1..152: mol_type = other DNA
aatgttgttgatgcaaccataaagtgttatttaataattatttataatcagcaacttaaccacaaaacaaccatatattgatatctcacaaaacaaccataagttgatatttttgtgaatcgagtatttcagcaaaactactgcagtaagaa

SEQ ID NO: 3401 - DNA, 152 bp, synthetic construct
  source 1..152: mol_type = other DNA
aatgttgttgatgcaaccataaagtggtatttaataattatttataatcagcaacttaaccacaaaacaaccatatattgatatctcacaaaacaaccataagttgatatttttgtgaatcgagtatttcagcaaaactactgcagtaagaa

SEQ ID NO: 3402 - DNA, 152 bp, synthetic construct
  source 1..152: mol_type = other DNA
aatgttgttgatgcaaccataaagtgctatttaataattatttataatcagcaacttaaccacaaaacaaccatatattgatatctcacaaaacaaccataagttgatatttttgtgaatcgagtatttcagcaaaactactgcagtaagaa

SEQ ID NO: 3403 - DNA, 152 bp, synthetic construct
  source 1..152: mol_type = other DNA
aatgttgttgatgcaaccataaagtaatatttaataattatttataatcagcaacttaaccacaaaacaaccatatattgatatctcacaaaacaaccataagttgatatttttgtgaatcgagtatttcagcaaaactactgcagtaagaa

SEQ ID NO: 3404 - DNA, 152 bp, synthetic construct
  source 1..152: mol_type = other DNA
aatgttgttgatgcaaccataaagttatatttaataattatttataatcagcaacttaaccacaaaacaaccatatattgatatctcacaaaacaaccataagttgatatttttgtgaatcgagtatttcagcaaaactactgcagtaagaa

SEQ ID NO: 3405 - DNA, 152 bp, synthetic construct
  source 1..152: mol_type = other DNA
aatgttgttgatgcaaccataaagtcatatttaataattatttataatcagcaacttaaccacaaaacaaccatatattgatatctcacaaaacaaccataagttgatatttttgtgaatcgagtatttcagcaaaactactgcagtaagaa

SEQ ID NO: 3406 - DNA, 152 bp, synthetic construct
  source 1..152: mol_type = other DNA
aatgttgttgatgcaaccataaagagatatttaataattatttataatcagcaacttaaccacaaaacaaccatatattgatatctcacaaaacaaccataagttgatatttttgtgaatcgagtatttcagcaaaactactgcagtaagaa

SEQ ID NO: 3407 - DNA, 152 bp, synthetic construct
  source 1..152: mol_type = other DNA
aatgttgttgatgcaaccataaagggatatttaataattatttataatcagcaacttaaccacaaaacaaccatatattgatatctcacaaaacaaccataagttgatatttttgtgaatcgagtatttcagcaaaactactgcagtaagaa

SEQ ID NO: 3408 - DNA, 152 bp, synthetic construct
  source 1..152: mol_type = other DNA
aatgttgttgatgcaaccataaagcgatatttaataattatttataatcagcaacttaaccacaaaacaaccatatattgatatctcacaaaacaaccataagttgatatttttgtgaatcgagtatttcagcaaaactactgcagtaagaa

SEQ ID NO: 3409 - DNA, 152 bp, synthetic construct
  source 1..152: mol_type = other DNA
aatgttgttgatgcaaccataaaatgatatttaataattatttataatcagcaacttaaccacaaaacaaccatatattgatatctcacaaaacaaccataagttgatatttttgtgaatcgagtatttcagcaaaactactgcagtaagaa

SEQ ID NO: 3410 - DNA, 152 bp, synthetic construct
  source 1..152: mol_type = other DNA
aatgttgttgatgcaaccataaattgatatttaataattatttataatcagcaacttaaccacaaaacaaccatatattgatatctcacaaaacaaccataagttgatatttttgtgaatcgagtatttcagcaaaactactgcagtaagaa

SEQ ID NO: 3411 - DNA, 152 bp, synthetic construct
  source 1..152: mol_type = other DNA
aatgttgttgatgcaaccataaactgatatttaataattatttataatcagcaacttaaccacaaaacaaccatatattgatatctcacaaaacaaccataagttgatatttttgtgaatcgagtatttcagcaaaactactgcagtaagaa

SEQ ID NO: 3412 - DNA, 152 bp, synthetic construct
  source 1..152: mol_type = other DNA
aatgttgttgatgcaaccataatgtgatatttaataattatttataatcagcaacttaaccacaaaacaaccatatattgatatctcacaaaacaaccataagttgatatttttgtgaatcgagtatttcagcaaaactactgcagtaagaa

SEQ ID NO: 3413 - DNA, 152 bp, synthetic construct
  source 1..152: mol_type = other DNA
aatgttgttgatgcaaccataaggtgatatttaataattatttataatcagcaacttaaccacaaaacaaccatatattgatatctcacaaaacaaccataagttgatatttttgtgaatcgagtatttcagcaaaactactgcagtaagaa

SEQ ID NO: 3414 - DNA, 152 bp, synthetic construct
  source 1..152: mol_type = other DNA
aatgttgttgatgcaaccataacgtgatatttaataattatttataatcagcaacttaaccacaaaacaaccatatattgatatctcacaaaacaaccataagttgatatttttgtgaatcgagtatttcagcaaaactactgcagtaagaa

SEQ ID NO: 3415 - DNA, 152 bp, synthetic construct
  source 1..152: mol_type = other DNA
aatgttgttgatgcaaccatatagtgatatttaataattatttataatcagcaacttaaccacaaaacaaccatatattgatatctcacaaaacaaccataagttgatatttttgtgaatcgagtatttcagcaaaactactgcagtaagaa

SEQ ID NO: 3416 - DNA, 152 bp, synthetic construct
  source 1..152: mol_type = other DNA
aatgttgttgatgcaaccatagagtgatatttaataattatttataatcagcaacttaaccacaaaacaaccatatattgatatctcacaaaacaaccataagttgatatttttgtgaatcgagtatttcagcaaaactactgcagtaagaa

SEQ ID NO: 3417 - DNA, 152 bp, synthetic construct
  source 1..152: mol_type = other DNA
aatgttgttgatgcaaccatacagtgatatttaataattatttataatcagcaacttaaccacaaaacaaccatatattgatatctcacaaaacaaccataagttgatatttttgtgaatcgagtatttcagcaaaactactgcagtaagaa

SEQ ID NO: 3418 - DNA, 152 bp, synthetic construct
  source 1..152: mol_type = other DNA
aatgttgttgatgcaaccattaagtgatatttaataattatttataatcagcaacttaaccacaaaacaaccatatattgatatctcacaaaacaaccataagttgatatttttgtgaatcgagtatttcagcaaaactactgcagtaagaa

SEQ ID NO: 3419 - DNA, 152 bp, synthetic construct
  source 1..152: mol_type = other DNA
aatgttgttgatgcaaccatgaagtgatatttaataattatttataatcagcaacttaaccacaaaacaaccatatattgatatctcacaaaacaaccataagttgatatttttgtgaatcgagtatttcagcaaaactactgcagtaagaa

SEQ ID NO: 3420 - DNA, 152 bp, synthetic construct
  source 1..152: mol_type = other DNA
aatgttgttgatgcaaccatcaagtgatatttaataattatttataatcagcaacttaaccacaaaacaaccatatattgatatctcacaaaacaaccataagttgatatttttgtgaatcgagtatttcagcaaaactactgcagtaagaa

SEQ ID NO: 3421 - DNA, 152 bp, synthetic construct
  source 1..152: mol_type = other DNA
aatgttgttgatgcaaccaaaaagtgatatttaataattatttataatcagcaacttaaccacaaaacaaccatatattgatatctcacaaaacaaccataagttgatatttttgtgaatcgagtatttcagcaaaactactgcagtaagaa

SEQ ID NO: 3422 - DNA, 152 bp, synthetic construct
  source 1..152: mol_type = other DNA
aatgttgttgatgcaaccagaaagtgatatttaataattatttataatcagcaacttaaccacaaaacaaccatatattgatatctcacaaaacaaccataagttgatatttttgtgaatcgagtatttcagcaaaactactgcagtaagaa

SEQ ID NO: 3423 - DNA, 152 bp, synthetic construct
  source 1..152: mol_type = other DNA
aatgttgttgatgcaaccacaaagtgatatttaataattatttataatcagcaacttaaccacaaaacaaccatatattgatatctcacaaaacaaccataagttgatatttttgtgaatcgagtatttcagcaaaactactgcagtaagaa

SEQ ID NO: 3424 - DNA, 152 bp, synthetic construct
  source 1..152: mol_type = other DNA
aatgttgttgatgcaaccttaaagtgatatttaataattatttataatcagcaacttaaccacaaaacaaccatatattgatatctcacaaaacaaccataagttgatatttttgtgaatcgagtatttcagcaaaactactgcagtaagaa

SEQ ID NO: 3425 - DNA, 152 bp, synthetic construct
  source 1..152: mol_type = other DNA
aatgttgttgatgcaaccgtaaagtgatatttaataattatttataatcagcaacttaaccacaaaacaaccatatattgatatctcacaaaacaaccataagttgatatttttgtgaatcgagtatttcagcaaaactactgcagtaagaa

SEQ ID NO: 3426 - DNA, 152 bp, synthetic construct
  source 1..152: mol_type = other DNA
aatgttgttgatgcaaccctaaagtgatatttaataattatttataatcagcaacttaaccacaaaacaaccatatattgatatctcacaaaacaaccataagttgatatttttgtgaatcgagtatttcagcaaaactactgcagtaagaa

SEQ ID NO: 3427 - DNA, 152 bp, synthetic construct
  source 1..152: mol_type = other DNA
aatgttgttgatgcaacaataaagtgatatttaataattatttataatcagcaacttaaccacaaaacaaccatatattgatatctcacaaaacaaccataagttgatatttttgtgaatcgagtatttcagcaaaactactgcagtaagaa

SEQ ID NO: 3428 - DNA, 152 bp, synthetic construct
  source 1..152: mol_type = other DNA
aatgttgttgatgcaactataaagtgatatttaataattatttataatcagcaacttaaccacaaaacaaccatatattgatatctcacaaaacaaccataagttgatatttttgtgaatcgagtatttcagcaaaactactgcagtaagaa

SEQ ID NO: 3429 - DNA, 152 bp, synthetic construct
  source 1..152: mol_type = other DNA
aatgttgttgatgcaacgataaagtgatatttaataattatttataatcagcaacttaaccacaaaacaaccatatattgatatctcacaaaacaaccataagttgatatttttgtgaatcgagtatttcagcaaaactactgcagtaagaa

SEQ ID NO: 3430 - DNA, 152 bp, synthetic construct
  source 1..152: mol_type = other DNA
aatgttgttgatgcaaacataaagtgatatttaataattatttataatcagcaacttaaccacaaaacaaccatatattgatatctcacaaaacaaccataagttgatatttttgtgaatcgagtatttcagcaaaactactgcagtaagaa

SEQ ID NO: 3431 - DNA, 152 bp, synthetic construct
  source 1..152: mol_type = other DNA
aatgttgttgatgcaatcataaagtgatatttaataattatttataatcagcaacttaaccacaaaacaaccatatattgatatctcacaaaacaaccataagttgatatttttgtgaatcgagtatttcagcaaaactactgcagtaagaa

SEQ ID NO: 3432 - DNA, 152 bp, synthetic construct
  source 1..152: mol_type = other DNA
aatgttgttgatgcaagcataaagtgatatttaataattatttataatcagcaacttaaccacaaaacaaccatatattgatatctcacaaaacaaccataagttgatatttttgtgaatcgagtatttcagcaaaactactgcagtaagaa

SEQ ID NO: 3433 - DNA, 152 bp, synthetic construct
  source 1..152: mol_type = other DNA
aatgttgttgatgcatccataaagtgatatttaataattatttataatcagcaacttaaccacaaaacaaccatatattgatatctcacaaaacaaccataagttgatatttttgtgaatcgagtatttcagcaaaactactgcagtaagaa

SEQ ID NO: 3434 - DNA, 152 bp, synthetic construct
  source 1..152: mol_type = other DNA
aatgttgttgatgcagccataaagtgatatttaataattatttataatcagcaacttaaccacaaaacaaccatatattgatatctcacaaaacaaccataagttgatatttttgtgaatcgagtatttcagcaaaactactgcagtaagaa

SEQ ID NO: 3435 - DNA, 152 bp, synthetic construct
  source 1..152: mol_type = other DNA
aatgttgttgatgcacccataaagtgatatttaataattatttataatcagcaacttaaccacaaaacaaccatatattgatatctcacaaaacaaccataagttgatatttttgtgaatcgagtatttcagcaaaactactgcagtaagaa

SEQ ID NO: 3436 - DNA, 152 bp, synthetic construct
  source 1..152: mol_type = other DNA
aatgttgttgatgctaccataaagtgatatttaataattatttataatcagcaacttaaccacaaaacaaccatatattgatatctcacaaaacaaccataagttgatatttttgtgaatcgagtatttcagcaaaactactgcagtaagaa

SEQ ID NO: 3437 - DNA, 152 bp, synthetic construct
  source 1..152: mol_type = other DNA
aatgttgttgatgcgaccataaagtgatatttaataattatttataatcagcaacttaaccacaaaacaaccatatattgatatctcacaaaacaaccataagttgatatttttgtgaatcgagtatttcagcaaaactactgcagtaagaa

SEQ ID NO: 3438 - DNA, 152 bp, synthetic construct
  source 1..152: mol_type = other DNA
aatgttgttgatgccaccataaagtgatatttaataattatttataatcagcaacttaaccacaaaacaaccatatattgatatctcacaaaacaaccataagttgatatttttgtgaatcgagtatttcagcaaaactactgcagtaagaa

SEQ ID NO: 3439 - DNA, 152 bp, synthetic construct
  source 1..152: mol_type = other DNA
aatgttgttgatgaaaccataaagtgatatttaataattatttataatcagcaacttaaccacaaaacaaccatatattgatatctcacaaaacaaccataagttgatatttttgtgaatcgagtatttcagcaaaactactgcagtaagaa

SEQ ID NO: 3440 - DNA, 152 bp, synthetic construct
  source 1..152: mol_type = other DNA
aatgttgttgatgtaaccataaagtgatatttaataattatttataatcagcaacttaaccacaaaacaaccatatattgatatctcacaaaacaaccataagttgatatttttgtgaatcgagtatttcagcaaaactactgcagtaagaa

SEQ ID NO: 3441 - DNA, 152 bp, synthetic construct
  source 1..152: mol_type = other DNA
aatgttgttgatggaaccataaagtgatatttaataattatttataatcagcaacttaaccacaaaacaaccatatattgatatctcacaaaacaaccataagttgatatttttgtgaatcgagtatttcagcaaaactactgcagtaagaa

SEQ ID NO: 3442 - DNA, 152 bp, synthetic construct
  source 1..152: mol_type = other DNA
aatgttgttgatacaaccataaagtgatatttaataattatttataatcagcaacttaaccacaaaacaaccatatattgatatctcacaaaacaaccataagttgatatttttgtgaatcgagtatttcagcaaaactactgcagtaagaa

SEQ ID NO: 3443 - DNA, 152 bp, synthetic construct
  source 1..152: mol_type = other DNA
aatgttgttgattcaaccataaagtgatatttaataattatttataatcagcaacttaaccacaaaacaaccatatattgatatctcacaaaacaaccataagttgatatttttgtgaatcgagtatttcagcaaaactactgcagtaagaa

SEQ ID NO: 3444 - DNA, 152 bp, synthetic construct
  source 1..152: mol_type = other DNA
aatgttgttgatccaaccataaagtgatatttaataattatttataatcagcaacttaaccacaaaacaaccatatattgatatctcacaaaacaaccataagttgatatttttgtgaatcgagtatttcagcaaaactactgcagtaagaa

SEQ ID NO: 3445 - DNA, 152 bp, synthetic construct
  source 1..152: mol_type = other DNA
aatgttgttgaagcaaccataaagtgatatttaataattatttataatcagcaacttaaccacaaaacaaccatatattgatatctcacaaaacaaccataagttgatatttttgtgaatcgagtatttcagcaaaactactgcagtaagaa

SEQ ID NO: 3446 - DNA, 152 bp, synthetic construct
  source 1..152: mol_type = other DNA
aatgttgttgaggcaaccataaagtgatatttaataattatttataatcagcaacttaaccacaaaacaaccatatattgatatctcacaaaacaaccataagttgatatttttgtgaatcgagtatttcagcaaaactactgcagtaagaa

SEQ ID NO: 3447 - DNA, 152 bp, synthetic construct
  source 1..152: mol_type = other DNA
aatgttgttgacgcaaccataaagtgatatttaataattatttataatcagcaacttaaccacaaaacaaccatatattgatatctcacaaaacaaccataagttgatatttttgtgaatcgagtatttcagcaaaactactgcagtaagaa

SEQ ID NO: 3448 - DNA, 152 bp, synthetic construct
  source 1..152: mol_type = other DNA
aatgttgttgttgcaaccataaagtgatatttaataattatttataatcagcaacttaaccacaaaacaaccatatattgatatctcacaaaacaaccataagttgatatttttgtgaatcgagtatttcagcaaaactactgcagtaagaa

SEQ ID NO: 3449 - DNA, 152 bp, synthetic construct
  source 1..152: mol_type = other DNA
aatgttgttggtgcaaccataaagtgatatttaataattatttataatcagcaacttaaccacaaaacaaccatatattgatatctcacaaaacaaccataagttgatatttttgtgaatcgagtatttcagcaaaactactgcagtaagaa

SEQ ID NO: 3450 - DNA, 152 bp, synthetic construct
  source 1..152: mol_type = other DNA
aatgttgttgctgcaaccataaagtgatatttaataattatttataatcagcaacttaaccacaaaacaaccatatattgatatctcacaaaacaaccataagttgatatttttgtgaatcgagtatttcagcaaaactactgcagtaagaa

SEQ ID NO: 3451 - DNA, 152 bp, synthetic construct
  source 1..152: mol_type = other DNA
aatgttgttaatgcaaccataaagtgatatttaataattatttataatcagcaacttaaccacaaaacaaccatatattgatatctcacaaaacaaccataagttgatatttttgtgaatcgagtatttcagcaaaactactgcagtaagaa

SEQ ID NO: 3452 - DNA, 152 bp, synthetic construct
  source 1..152: mol_type = other DNA
aatgttgtttatgcaaccataaagtgatatttaataattatttataatcagcaacttaaccacaaaacaaccatatattgatatctcacaaaacaaccataagttgatatttttgtgaatcgagtatttcagcaaaactactgcagtaagaa

SEQ ID NO: 3453 - DNA, 152 bp, synthetic construct
  source 1..152: mol_type = other DNA
aatgttgttcatgcaaccataaagtgatatttaataattatttataatcagcaacttaaccacaaaacaaccatatattgatatctcacaaaacaaccataagttgatatttttgtgaatcgagtatttcagcaaaactactgcagtaagaa

SEQ ID NO: 3454 - DNA, 152 bp, synthetic construct
  source 1..152: mol_type = other DNA
aatgttgtagatgcaaccataaagtgatatttaataattatttataatcagcaacttaaccacaaaacaaccatatattgatatctcacaaaacaaccataagttgatatttttgtgaatcgagtatttcagcaaaactactgcagtaagaa

SEQ ID NO: 3455 - DNA, 152 bp, synthetic construct
  source 1..152: mol_type = other DNA
aatgttgtggatgcaaccataaagtgatatttaataattatttataatcagcaacttaaccacaaaacaaccatatattgatatctcacaaaacaaccataagttgatatttttgtgaatcgagtatttcagcaaaactactgcagtaagaa

SEQ ID NO: 3456 - DNA, 152 bp, synthetic construct
  source 1..152: mol_type = other DNA
aatgttgtcgatgcaaccataaagtgatatttaataattatttataatcagcaacttaaccacaaaacaaccatatattgatatctcacaaaacaaccataagttgatatttttgtgaatcgagtatttcagcaaaactactgcagtaagaa

SEQ ID NO: 3457 - DNA, 152 bp, synthetic construct
  source 1..152: mol_type = other DNA
aatgttgatgatgcaaccataaagtgatatttaataattatttataatcagcaacttaaccacaaaacaaccatatattgatatctcacaaaacaaccataagttgatatttttgtgaatcgagtatttcagcaaaactactgcagtaagaa

SEQ ID NO: 3458 - DNA, 152 bp, synthetic construct
  source 1..152: mol_type = other DNA
aatgttggtgatgcaaccataaagtgatatttaataattatttataatcagcaacttaaccacaaaacaaccatatattgatatctcacaaaacaaccataagttgatatttttgtgaatcgagtatttcagcaaaactactgcagtaagaa

SEQ ID NO: 3459 - DNA, 152 bp, synthetic construct
  source 1..152: mol_type = other DNA
aatgttgctgatgcaaccataaagtgatatttaataattatttataatcagcaacttaaccacaaaacaaccatatattgatatctcacaaaacaaccataagttgatatttttgtgaatcgagtatttcagcaaaactactgcagtaagaa

SEQ ID NO: 3460 - DNA, 152 bp, synthetic construct
  source 1..152: mol_type = other DNA
aatgttattgatgcaaccataaagtgatatttaataattatttataatcagcaacttaaccacaaaacaaccatatattgatatctcacaaaacaaccataagttgatatttttgtgaatcgagtatttcagcaaaactactgcagtaagaa

SEQ ID NO: 3461 - DNA, 152 bp, synthetic construct
  source 1..152: mol_type = other DNA
aatgtttttgatgcaaccataaagtgatatttaataattatttataatcagcaacttaaccacaaaacaaccatatattgatatctcacaaaacaaccataagttgatatttttgtgaatcgagtatttcagcaaaactactgcagtaagaa

SEQ ID NO: 3462 - DNA, 152 bp, synthetic construct
  source 1..152: mol_type = other DNA
aatgttcttgatgcaaccataaagtgatatttaataattatttataatcagcaacttaaccacaaaacaaccatatattgatatctcacaaaacaaccataagttgatatttttgtgaatcgagtatttcagcaaaactactgcagtaagaa

SEQ ID NO: 3463 - DNA, 152 bp, synthetic construct
  source 1..152: mol_type = other DNA
aatgtagttgatgcaaccataaagtgatatttaataattatttataatcagcaacttaaccacaaaacaaccatatattgatatctcacaaaacaaccataagttgatatttttgtgaatcgagtatttcagcaaaactactgcagtaagaa

SEQ ID NO: 3464 - DNA, 152 bp, synthetic construct
  source 1..152: mol_type = other DNA
aatgtggttgatgcaaccataaagtgatatttaataattatttataatcagcaacttaaccacaaaacaaccatatattgatatctcacaaaacaaccataagttgatatttttgtgaatcgagtatttcagcaaaactactgcagtaagaa

SEQ ID NO: 3465 - DNA, 152 bp, synthetic construct
  source 1..152: mol_type = other DNA
aatgtcgttgatgcaaccataaagtgatatttaataattatttataatcagcaacttaaccacaaaacaaccatatattgatatctcacaaaacaaccataagttgatatttttgtgaatcgagtatttcagcaaaactactgcagtaagaa

SEQ ID NO: 3466 - DNA, 152 bp, synthetic construct
  source 1..152: mol_type = other DNA
aatgatgttgatgcaaccataaagtgatatttaataattatttataatcagcaacttaaccacaaaacaaccatatattgatatctcacaaaacaaccataagttgatatttttgtgaatcgagtatttcagcaaaactactgcagtaagaa

SEQ ID NO: 3467 - DNA, 152 bp, synthetic construct
  source 1..152: mol_type = other DNA
aatggtgttgatgcaaccataaagtgatatttaataattatttataatcagcaacttaaccacaaaacaaccatatattgatatctcacaaaacaaccataagttgatatttttgtgaatcgagtatttcagcaaaactactgcagtaagaa

SEQ ID NO: 3468 - DNA, 152 bp, synthetic construct
  source 1..152: mol_type = other DNA
aatgctgttgatgcaaccataaagtgatatttaataattatttataatcagcaacttaaccacaaaacaaccatatattgatatctcacaaaacaaccataagttgatatttttgtgaatcgagtatttcagcaaaactactgcagtaagaa

SEQ ID NO: 3469 - DNA, 152 bp, synthetic construct
  source 1..152: mol_type = other DNA
aatattgttgatgcaaccataaagtgatatttaataattatttataatcagcaacttaaccacaaaacaaccatatattgatatctcacaaaacaaccataagttgatatttttgtgaatcgagtatttcagcaaaactactgcagtaagaa

SEQ ID NO: 3470 - DNA, 152 bp, synthetic construct
  source 1..152: mol_type = other DNA
aattttgttgatgcaaccataaagtgatatttaataattatttataatcagcaacttaaccacaaaacaaccatatattgatatctcacaaaacaaccataagttgatatttttgtgaatcgagtatttcagcaaaactactgcagtaagaa

SEQ ID NO: 3471 - DNA, 152 bp, synthetic construct
  source 1..152: mol_type = other DNA
aatcttgttgatgcaaccataaagtgatatttaataattatttataatcagcaacttaaccacaaaacaaccatatattgatatctcacaaaacaaccataagttgatatttttgtgaatcgagtatttcagcaaaactactgcagtaagaa

SEQ ID NO: 3472 - DNA, 152 bp, synthetic construct
  source 1..152: mol_type = other DNA
aaagttgttgatgcaaccataaagtgatatttaataattatttataatcagcaacttaaccacaaaacaaccatatattgatatctcacaaaacaaccataagttgatatttttgtgaatcgagtatttcagcaaaactactgcagtaagaa

SEQ ID NO: 3473 - DNA, 152 bp, synthetic construct
  source 1..152: mol_type = other DNA
aaggttgttgatgcaaccataaagtgatatttaataattatttataatcagcaacttaaccacaaaacaaccatatattgatatctcacaaaacaaccataagttgatatttttgtgaatcgagtatttcagcaaaactactgcagtaagaa

SEQ ID NO: 3474 - DNA, 152 bp, synthetic construct
  source 1..152: mol_type = other DNA
aacgttgttgatgcaaccataaagtgatatttaataattatttataatcagcaacttaaccacaaaacaaccatatattgatatctcacaaaacaaccataagttgatatttttgtgaatcgagtatttcagcaaaactactgcagtaagaa

SEQ ID NO: 3475 - DNA, 152 bp, synthetic construct
  source 1..152: mol_type = other DNA
attgttgttgatgcaaccataaagtgatatttaataattatttataatcagcaacttaaccacaaaacaaccatatattgatatctcacaaaacaaccataagttgatatttttgtgaatcgagtatttcagcaaaactactgcagtaagaa

SEQ ID NO: 3476 - DNA, 152 bp, synthetic construct
  source 1..152: mol_type = other DNA
agtgttgttgatgcaaccataaagtgatatttaataattatttataatcagcaacttaaccacaaaacaaccatatattgatatctcacaaaacaaccataagttgatatttttgtgaatcgagtatttcagcaaaactactgcagtaagaa

SEQ ID NO: 3477 - DNA, 152 bp, synthetic construct
  source 1..152: mol_type = other DNA
actgttgttgatgcaaccataaagtgatatttaataattatttataatcagcaacttaaccacaaaacaaccatatattgatatctcacaaaacaaccataagttgatatttttgtgaatcgagtatttcagcaaaactactgcagtaagaa

SEQ ID NO: 3478 - DNA, 152 bp, synthetic construct
  source 1..152: mol_type = other DNA
tatgttgttgatgcaaccataaagtgatatttaataattatttataatcagcaacttaaccacaaaacaaccatatattgatatctcacaaaacaaccataagttgatatttttgtgaatcgagtatttcagcaaaactactgcagtaagaa

SEQ ID NO: 3479 - DNA, 152 bp, synthetic construct
  source 1..152: mol_type = other DNA
gatgttgttgatgcaaccataaagtgatatttaataattatttataatcagcaacttaaccacaaaacaaccatatattgatatctcacaaaacaaccataagttgatatttttgtgaatcgagtatttcagcaaaactactgcagtaagaa

SEQ ID NO: 3480 - DNA, 152 bp, synthetic construct
  source 1..152: mol_type = other DNA
catgttgttgatgcaaccataaagtgatatttaataattatttataatcagcaacttaaccacaaaacaaccatatattgatatctcacaaaacaaccataagttgatatttttgtgaatcgagtatttcagcaaaactactgcagtaagaa

SEQ ID NO: 3481 - DNA, 152 bp, synthetic construct
  source 1..152: mol_type = other DNA
aatgttgttgatgcaaccataaagtgatatttaataattatttataatcagcaacttaaccacaaaacaaccatatattgatatctcacaaaacaaccataagttgatatttttgtgacgcgagtatttcagcaaaactactgcagtaagaa

SEQ ID NO: 3482 - DNA, 152 bp, synthetic construct
  source 1..152: mol_type = other DNA
aatgttgttgatgcaaccataaagtgatatttaataattatttataatcagcaacttaaccacaaaacaaccatatattgatatctcacaaaacaaccataagttgatatttttgtgcctcgagtatttcagcaaaactactgcagtaagaa

SEQ ID NO: 3483 - DNA, 152 bp, synthetic construct
  source 1..152: mol_type = other DNA
aatgttgttgatgcaaccataaagtgatatttaataattatttataatcagcaacttaaccacaaaacaaccatatattgatatctcacaaaacaaccataagttgatatttttgttcatcgagtatttcagcaaaactactgcagtaagaa

SEQ ID NO: 3484 - DNA, 152 bp, synthetic construct
  source 1..152: mol_type = other DNA
aatgttgttgatgcaaccataaagtgatatttaataattatttataatcagcaacttaaccacaaaacaaccatatattgatatctcacaaaacaaccataagttgatatttttggtaatcgagtatttcagcaaaactactgcagtaagaa

SEQ ID NO: 3485 - DNA, 152 bp, synthetic construct
  source 1..152: mol_type = other DNA
aatgttgttgatgcaaccataaagtgatatttaataattatttataatcagcaacttaaccacaaaacaaccatatattgatatctcacaaaacaaccataagttgatattttttggaatcgagtatttcagcaaaactactgcagtaagaa

SEQ ID NO: 3486 - DNA, 152 bp, synthetic construct
  source 1..152: mol_type = other DNA
aatgttgttgatgcaaccataaagtgatatttaataattatttataatcagcaacttaaccacaaaacaaccatatattgatatctcacaaaacaaccataagttgatattttgttgaatcgagtatttcagcaaaactactgcagtaagaa

SEQ ID NO: 3487 - DNA, 152 bp, synthetic construct
  source 1..152: mol_type = other DNA
aatgttgttgatgcaaccataaagtgatatttaataattatttataatcagcaacttaaccacaaaacaaccatatattgatatctcacaaaacaaccataagttgatatttgggtgaatcgagtatttcagcaaaactactgcagtaagaa

SEQ ID NO: 3488 - DNA, 152 bp, synthetic construct
  source 1..152: mol_type = other DNA
aatgttgttgatgcaaccataaagtgatatttaataattatttataatcagcaacttaaccacaaaacaaccatatattgatatctcacaaaacaaccataagttgatattggtgtgaatcgagtatttcagcaaaactactgcagtaagaa

SEQ ID NO: 3489 - DNA, 152 bp, synthetic construct
  source 1..152: mol_type = other DNA
aatgttgttgatgcaaccataaagtgatatttaataattatttataatcagcaacttaaccacaaaacaaccatatattgatatctcacaaaacaaccataagttgatatggttgtgaatcgagtatttcagcaaaactactgcagtaagaa

SEQ ID NO: 3490 - DNA, 152 bp, synthetic construct
  source 1..152: mol_type = other DNA
aatgttgttgatgcaaccataaagtgatatttaataattatttataatcagcaacttaaccacaaaacaaccatatattgatatctcacaaaacaaccataagttgataggtttgtgaatcgagtatttcagcaaaactactgcagtaagaa

SEQ ID NO: 3491 - DNA, 152 bp, synthetic construct
  source 1..152: mol_type = other DNA
aatgttgttgatgcaaccataaagtgatatttaataattatttataatcagcaacttaaccacaaaacaaccatatattgatatctcacaaaacaaccataagttgatcgttttgtgaatcgagtatttcagcaaaactactgcagtaagaa

SEQ ID NO: 3492 - DNA, 152 bp, synthetic construct
  source 1..152: mol_type = other DNA
aatgttgttgatgcaaccataaagtgatatttaataattatttataatcagcaacttaaccacaaaacaaccatatattgatatctcacaaaacaaccataagttgagctttttgtgaatcgagtatttcagcaaaactactgcagtaagaa

SEQ ID NO: 3493 - DNA, 152 bp, synthetic construct
  source 1..152: mol_type = other DNA
aatgttgttgatgcaaccataaagtgatatttaataattatttataatcagcaacttaaccacaaaacaaccatatattgatatctcacaaaacaaccataagttgcgatttttgtgaatcgagtatttcagcaaaactactgcagtaagaa

SEQ ID NO: 3494 - DNA, 152 bp, synthetic construct
  source 1..152: mol_type = other DNA
aatgttgttgatgcaaccataaagtgatatttaataattatttataatcagcaacttaaccacaaaacaaccatatattgatatctcacaaaacaaccataagtttctatttttgtgaatcgagtatttcagcaaaactactgcagtaagaa

SEQ ID NO: 3495 - DNA, 152 bp, synthetic construct
  source 1..152: mol_type = other DNA
aatgttgttgatgcaaccataaagtgatatttaataattatttataatcagcaacttaaccacaaaacaaccatatattgatatctcacaaaacaaccataagtgtatatttttgtgaatcgagtatttcagcaaaactactgcagtaagaa

SEQ ID NO: 3496 - DNA, 152 bp, synthetic construct
  source 1..152: mol_type = other DNA
aatgttgttgatgcaaccataaagtgatatttaataattatttataatcagcaacttaaccacaaaacaaccatatattgatatctcacaaaacaaccataaggggatatttttgtgaatcgagtatttcagcaaaactactgcagtaagaa

SEQ ID NO: 3497 - DNA, 152 bp, synthetic construct
  source 1..152: mol_type = other DNA
aatgttgttgatgcaaccataaagtgatatttaataattatttataatcagcaacttaaccacaaaacaaccatatattgatatctcacaaaacaaccataatgtgatatttttgtgaatcgagtatttcagcaaaactactgcagtaagaa

SEQ ID NO: 3498 - DNA, 152 bp, synthetic construct
  source 1..152: mol_type = other DNA
aatgttgttgatgcaaccataaagtgatatttaataattatttataatcagcaacttaaccacaaaacaaccatatattgatatctcacaaaacaaccatactttgatatttttgtgaatcgagtatttcagcaaaactactgcagtaagaa

SEQ ID NO: 3499 - DNA, 152 bp, synthetic construct
  source 1..152: mol_type = other DNA
aatgttgttgatgcaaccataaagtgatatttaataattatttataatcagcaacttaaccacaaaacaaccatatattgatatctcacaaaacaaccatccgttgatatttttgtgaatcgagtatttcagcaaaactactgcagtaagaa

SEQ ID NO: 3500 - DNA, 152 bp, synthetic construct
  source 1..152: mol_type = other DNA
aatgttgttgatgcaaccataaagtgatatttaataattatttataatcagcaacttaaccacaaaacaaccatatattgatatctcacaaaacaaccagcagttgatatttttgtgaatcgagtatttcagcaaaactactgcagtaagaa

SEQ ID NO: 3501 - DNA, 152 bp, synthetic construct
  source 1..152: mol_type = other DNA
aatgttgttgatgcaaccataaagtgatatttaataattatttataatcagcaacttaaccacaaaacaaccatatattgatatctcacaaaacaacccgaagttgatatttttgtgaatcgagtatttcagcaaaactactgcagtaagaa

SEQ ID NO: 3502 - DNA, 152 bp, synthetic construct
  source 1..152: mol_type = other DNA
aatgttgttgatgcaaccataaagtgatatttaataattatttataatcagcaacttaaccacaaaacaaccatatattgatatctcacaaaacaacactaagttgatatttttgtgaatcgagtatttcagcaaaactactgcagtaagaa

SEQ ID NO: 3503 - DNA, 152 bp, synthetic construct
  source 1..152: mol_type = other DNA
aatgttgttgatgcaaccataaagtgatatttaataattatttataatcagcaacttaaccacaaaacaaccatatattgatatctcacaaaacaaaaataagttgatatttttgtgaatcgagtatttcagcaaaactactgcagtaagaa

SEQ ID NO: 3504 - DNA, 152 bp, synthetic construct
  source 1..152: mol_type = other DNA
aatgttgttgatgcaaccataaagtgatatttaataattatttataatcagcaacttaaccacaaaacaaccatatattgatatctcacaaaacacacataagttgatatttttgtgaatcgagtatttcagcaaaactactgcagtaagaa

SEQ ID NO: 3505 - DNA, 152 bp, synthetic construct
  source 1..152: mol_type = other DNA
aatgttgttgatgcaaccataaagtgatatttaataattatttataatcagcaacttaaccacaaaacaaccatatattgatatctcacaaaacccccataagttgatatttttgtgaatcgagtatttcagcaaaactactgcagtaagaa

SEQ ID NO: 3506 - DNA, 152 bp, synthetic construct
  source 1..152: mol_type = other DNA
aatgttgttgatgcaaccataaagtgatatttaataattatttataatcagcaacttaaccacaaaacaaccatatattgatatctcacaaaaacaccataagttgatatttttgtgaatcgagtatttcagcaaaactactgcagtaagaa

SEQ ID NO: 3507 - DNA, 152 bp, synthetic construct
  source 1..152: mol_type = other DNA
aatgttgttgatgcaaccataaagtgatatttaataattatttataatcagcaacttaaccacaaaacaaccatatattgatatctcacaaacaaaccataagttgatatttttgtgaatcgagtatttcagcaaaactactgcagtaagaa

SEQ ID NO: 3508 - DNA, 152 bp, synthetic construct
  source 1..152: mol_type = other DNA
aatgttgttgatgcaaccataaagtgatatttaataattatttataatcagcaacttaaccacaaaacaaccatatattgatatctcacaacccaaccataagttgatatttttgtgaatcgagtatttcagcaaaactactgcagtaagaa

SEQ ID NO: 3509 - DNA, 152 bp, synthetic construct
  source 1..152: mol_type = other DNA
aatgttgttgatgcaaccataaagtgatatttaataattatttataatcagcaacttaaccacaaaacaaccatatattgatatctcacaccacaaccataagttgatatttttgtgaatcgagtatttcagcaaaactactgcagtaagaa

SEQ ID NO: 3510 - DNA, 152 bp, synthetic construct
  source 1..152: mol_type = other DNA
aatgttgttgatgcaaccataaagtgatatttaataattatttataatcagcaacttaaccacaaaacaaccatatattgatatctcacccaacaaccataagttgatatttttgtgaatcgagtatttcagcaaaactactgcagtaagaa

SEQ ID NO: 3511 - DNA, 152 bp, synthetic construct
  source 1..152: mol_type = other DNA
aatgttgttgatgcaaccataaagtgatatttaataattatttataatcagcaacttaaccacaaaacaaccatatattgatatctcaacaaacaaccataagttgatatttttgtgaatcgagtatttcagcaaaactactgcagtaagaa

SEQ ID NO: 3512 - DNA, 152 bp, synthetic construct
  source 1..152: mol_type = other DNA
aatgttgttgatgcaaccataaagtgatatttaataattatttataatcagcaacttaaccacaaaacaaccatatattgatatctccaaaaacaaccataagttgatatttttgtgaatcgagtatttcagcaaaactactgcagtaagaa

SEQ ID NO: 3513 - DNA, 152 bp, synthetic construct
  source 1..152: mol_type = other DNA
aatgttgttgatgcaaccataaagtgatatttaataattatttataatcagcaacttaaccacaaaacaaccatatattgatatctaccaaaacaaccataagttgatatttttgtgaatcgagtatttcagcaaaactactgcagtaagaa

SEQ ID NO: 3514 - DNA, 152 bp, synthetic construct
  source 1..152: mol_type = other DNA
aatgttgttgatgcaaccataaagtgatatttaataattatttataatcagcaacttaaccacaaaacaaccatatattgatatcgaacaaaacaaccataagttgatatttttgtgaatcgagtatttcagcaaaactactgcagtaagaa

SEQ ID NO: 3515 - DNA, 152 bp, synthetic construct
  source 1..152: mol_type = other DNA
aatgttgttgatgcaaccataaagtgatatttaataattatttataatcagcaacttaaccacaaaacaaccatatattgatatagcacaaaacaaccataagttgatatttttgtgaatcgagtatttcagcaaaactactgcagtaagaa

SEQ ID NO: 3516 - DNA, 152 bp, synthetic construct
  source 1..152: mol_type = other DNA
aatgttgttgatgcaaccataaagtgatatttaataattatttataatcagcaacttaaccacaaaacaaccatatattgatagatcacaaaacaaccataagttgatatttttgtgaatcgagtatttcagcaaaactactgcagtaagaa

SEQ ID NO: 3517 - DNA, 152 bp, synthetic construct
  source 1..152: mol_type = other DNA
aatgttgttgatgcaaccataaagtgatatttaataattatttataatcagcaacttaaccacaaaacaaccatatattgatcgctcacaaaacaaccataagttgatatttttgtgaatcgagtatttcagcaaaactactgcagtaagaa

SEQ ID NO: 3518 - DNA, 152 bp, synthetic construct
  source 1..152: mol_type = other DNA
aatgttgttgatgcaaccataaagtgatatttaataattatttataatcagcaacttaaccacaaaacaaccatatattgagctctcacaaaacaaccataagttgatatttttgtgaatcgagtatttcagcaaaactactgcagtaagaa

SEQ ID NO: 3519 - DNA, 152 bp, synthetic construct
  source 1..152: mol_type = other DNA
aatgttgttgatgcaaccataaagtgatatttaataattatttataatcagcaacttaaccacaaaacaaccatatattgcgatctcacaaaacaaccataagttgatatttttgtgaatcgagtatttcagcaaaactactgcagtaagaa

SEQ ID NO: 3520 - DNA, 152 bp, synthetic construct
  source 1..152: mol_type = other DNA
aatgttgttgatgcaaccataaagtgatatttaataattatttataatcagcaacttaaccacaaaacaaccatatatttctatctcacaaaacaaccataagttgatatttttgtgaatcgagtatttcagcaaaactactgcagtaagaa

SEQ ID NO: 3521 - DNA, 152 bp, synthetic construct
  source 1..152: mol_type = other DNA
aatgttgttgatgcaaccataaagtgatatttaataattatttataatcagcaacttaaccacaaaacaaccatatatgtatatctcacaaaacaaccataagttgatatttttgtgaatcgagtatttcagcaaaactactgcagtaagaa

SEQ ID NO: 3522 - DNA, 152 bp, synthetic construct
  source 1..152: mol_type = other DNA
aatgttgttgatgcaaccataaagtgatatttaataattatttataatcagcaacttaaccacaaaacaaccatatagggatatctcacaaaacaaccataagttgatatttttgtgaatcgagtatttcagcaaaactactgcagtaagaa

SEQ ID NO: 3523 - DNA, 152 bp, synthetic construct
  source 1..152: mol_type = other DNA
aatgttgttgatgcaaccataaagtgatatttaataattatttataatcagcaacttaaccacaaaacaaccatatcgtgatatctcacaaaacaaccataagttgatatttttgtgaatcgagtatttcagcaaaactactgcagtaagaa

SEQ ID NO: 3524 - DNA, 152 bp, synthetic construct
  source 1..152: mol_type = other DNA
aatgttgttgatgcaaccataaagtgatatttaataattatttataatcagcaacttaaccacaaaacaaccatagcttgatatctcacaaaacaaccataagttgatatttttgtgaatcgagtatttcagcaaaactactgcagtaagaa

SEQ ID NO: 3525 - DNA, 152 bp, synthetic construct
  source 1..152: mol_type = other DNA
aatgttgttgatgcaaccataaagtgatatttaataattatttataatcagcaacttaaccacaaaacaaccatcgattgatatctcacaaaacaaccataagttgatatttttgtgaatcgagtatttcagcaaaactactgcagtaagaa

SEQ ID NO: 3526 - DNA, 152 bp, synthetic construct
  source 1..152: mol_type = other DNA
aatgttgttgatgcaaccataaagtgatatttaataattatttataatcagcaacttaaccacaaaacaaccagctattgatatctcacaaaacaaccataagttgatatttttgtgaatcgagtatttcagcaaaactactgcagtaagaa

SEQ ID NO: 3527 - DNA, 152 bp, synthetic construct
  source 1..152: mol_type = other DNA
aatgttgttgatgcaaccataaagtgatatttaataattatttataatcagcaacttaaccacaaaacaacccgatattgatatctcacaaaacaaccataagttgatatttttgtgaatcgagtatttcagcaaaactactgcagtaagaa

SEQ ID NO: 3528 - DNA, 152 bp, synthetic construct
  source 1..152: mol_type = other DNA
aatgttgttgatgcaaccataaagtgatatttaataattatttataatcagcaacttaaccacaaaacaacactatattgatatctcacaaaacaaccataagttgatatttttgtgaatcgagtatttcagcaaaactactgcagtaagaa

SEQ ID NO: 3529 - DNA, 152 bp, synthetic construct
  source 1..152: mol_type = other DNA
aatgttgttgatgcaaccataaagtgatatttaataattatttataatcagcaacttaaccacaaaacaaaaatatattgatatctcacaaaacaaccataagttgatatttttgtgaatcgagtatttcagcaaaactactgcagtaagaa

SEQ ID NO: 3530 - DNA, 152 bp, synthetic construct
  source 1..152: mol_type = other DNA
aatgttgttgatgcaaccataaagtgatatttaataattatttataatcagcaacttaaccacaaaacacacatatattgatatctcacaaaacaaccataagttgatatttttgtgaatcgagtatttcagcaaaactactgcagtaagaa

SEQ ID NO: 3531 - DNA, 152 bp, synthetic construct
  source 1..152: mol_type = other DNA
aatgttgttgatgcaaccataaagtgatatttaataattatttataatcagcaacttaaccacaaaacccccatatattgatatctcacaaaacaaccataagttgatatttttgtgaatcgagtatttcagcaaaactactgcagtaagaa

SEQ ID NO: 3532 - DNA, 152 bp, synthetic construct
  source 1..152: mol_type = other DNA
aatgttgttgatgcaaccataaagtgatatttaataattatttataatcagcaacttaaccacaaaaacaccatatattgatatctcacaaaacaaccataagttgatatttttgtgaatcgagtatttcagcaaaactactgcagtaagaa

SEQ ID NO: 3533 - DNA, 152 bp, synthetic construct
  source 1..152: mol_type = other DNA
aatgttgttgatgcaaccataaagtgatatttaataattatttataatcagcaacttaaccacaaacaaaccatatattgatatctcacaaaacaaccataagttgatatttttgtgaatcgagtatttcagcaaaactactgcagtaagaa

SEQ ID NO: 3534 - DNA, 152 bp, synthetic construct
  source 1..152: mol_type = other DNA
aatgttgttgatgcaaccataaagtgatatttaataattatttataatcagcaacttaaccacaacccaaccatatattgatatctcacaaaacaaccataagttgatatttttgtgaatcgagtatttcagcaaaactactgcagtaagaa

SEQ ID NO: 3535 - DNA, 152 bp, synthetic construct
  source 1..152: mol_type = other DNA
aatgttgttgatgcaaccataaagtgatatttaataattatttataatcagcaacttaaccacaccacaaccatatattgatatctcacaaaacaaccataagttgatatttttgtgaatcgagtatttcagcaaaactactgcagtaagaa

SEQ ID NO: 3536 - DNA, 152 bp, synthetic construct
  source 1..152: mol_type = other DNA
aatgttgttgatgcaaccataaagtgatatttaataattatttataatcagcaacttaaccacccaacaaccatatattgatatctcacaaaacaaccataagttgatatttttgtgaatcgagtatttcagcaaaactactgcagtaagaa

SEQ ID NO: 3537 - DNA, 152 bp, synthetic construct
  source 1..152: mol_type = other DNA
aatgttgttgatgcaaccataaagtgatatttaataattatttataatcagcaacttaaccaacaaacaaccatatattgatatctcacaaaacaaccataagttgatatttttgtgaatcgagtatttcagcaaaactactgcagtaagaa

SEQ ID NO: 3538 - DNA, 152 bp, synthetic construct
  source 1..152: mol_type = other DNA
aatgttgttgatgcaaccataaagtgatatttaataattatttataatcagcaacttaacccaaaaacaaccatatattgatatctcacaaaacaaccataagttgatatttttgtgaatcgagtatttcagcaaaactactgcagtaagaa

SEQ ID NO: 3539 - DNA, 152 bp, synthetic construct
  source 1..152: mol_type = other DNA
aatgttgttgatgcaaccataaagtgatatttaataattatttataatcagcaacttaacaccaaaacaaccatatattgatatctcacaaaacaaccataagttgatatttttgtgaatcgagtatttcagcaaaactactgcagtaagaa

SEQ ID NO: 3540 - DNA, 152 bp, synthetic construct
  source 1..152: mol_type = other DNA
aatgttgttgatgcaaccataaagtgatatttaataattatttataatcagcaacttaaaaacaaaacaaccatatattgatatctcacaaaacaaccataagttgatatttttgtgaatcgagtatttcagcaaaactactgcagtaagaa

SEQ ID NO: 3541 - DNA, 152 bp, synthetic construct
  source 1..152: mol_type = other DNA
aatgttgttgatgcaaccataaagtgatatttaataattatttataatcagcaacttacacacaaaacaaccatatattgatatctcacaaaacaaccataagttgatatttttgtgaatcgagtatttcagcaaaactactgcagtaagaa

SEQ ID NO: 3542 - DNA, 152 bp, synthetic construct
  source 1..152: mol_type = other DNA
aatgttgttgatgcaaccataaagtgatatttaataattatttataatcagcaacttccccacaaaacaaccatatattgatatctcacaaaacaaccataagttgatatttttgtgaatcgagtatttcagcaaaactactgcagtaagaa

SEQ ID NO: 3543 - DNA, 152 bp, synthetic construct
  source 1..152: mol_type = other DNA
aatgttgttgatgcaaccataaagtgatatttaataattatttataatcagcaactgcaccacaaaacaaccatatattgatatctcacaaaacaaccataagttgatatttttgtgaatcgagtatttcagcaaaactactgcagtaagaa

SEQ ID NO: 3544 - DNA, 152 bp, synthetic construct
  source 1..152: mol_type = other DNA
aatgttgttgatgcaaccataaagtgatatttaataattatttataatcagcaacggaaccacaaaacaaccatatattgatatctcacaaaacaaccataagttgatatttttgtgaatcgagtatttcagcaaaactactgcagtaagaa

SEQ ID NO: 3545 - DNA, 152 bp, synthetic construct
  source 1..152: mol_type = other DNA
aatgttgttgatgcaaccataaagtgatatttaataattatttataatcagcaaagtaaccacaaaacaaccatatattgatatctcacaaaacaaccataagttgatatttttgtgaatcgagtatttcagcaaaactactgcagtaagaa

SEQ ID NO: 3546 - DNA, 152 bp, synthetic construct
  source 1..152: mol_type = other DNA
aatgttgttgatgcaaccataaagtgatatttaataattatttataatcagcacattaaccacaaaacaaccatatattgatatctcacaaaacaaccataagttgatatttttgtgaatcgagtatttcagcaaaactactgcagtaagaa

SEQ ID NO: 3547 - DNA, 152 bp, synthetic construct
  source 1..152: mol_type = other DNA
aatgttgttgatgcaaccataaagtgatatttaataattatttataatcagccccttaaccacaaaacaaccatatattgatatctcacaaaacaaccataagttgatatttttgtgaatcgagtatttcagcaaaactactgcagtaagaa

SEQ ID NO: 3548 - DNA, 152 bp, synthetic construct
  source 1..152: mol_type = other DNA
aatgttgttgatgcaaccataaagtgatatttaataattatttataatcagacacttaaccacaaaacaaccatatattgatatctcacaaaacaaccataagttgatatttttgtgaatcgagtatttcagcaaaactactgcagtaagaa

SEQ ID NO: 3549 - DNA, 152 bp, synthetic construct
  source 1..152: mol_type = other DNA
aatgttgttgatgcaaccataaagtgatatttaataattatttataatcataaacttaaccacaaaacaaccatatattgatatctcacaaaacaaccataagttgatatttttgtgaatcgagtatttcagcaaaactactgcagtaagaa

SEQ ID NO: 3550 - DNA, 152 bp, synthetic construct
  source 1..152: mol_type = other DNA
aatgttgttgatgcaaccataaagtgatatttaataattatttataatcctcaacttaaccacaaaacaaccatatattgatatctcacaaaacaaccataagttgatatttttgtgaatcgagtatttcagcaaaactactgcagtaagaa

SEQ ID NO: 3551 - DNA, 152 bp, synthetic construct
  source 1..152: mol_type = other DNA
aatgttgttgatgcaaccataaagtgatatttaataattatttataatacgcaacttaaccacaaaacaaccatatattgatatctcacaaaacaaccataagttgatatttttgtgaatcgagtatttcagcaaaactactgcagtaagaa

SEQ ID NO: 3552 - DNA, 152 bp, synthetic construct
  source 1..152: mol_type = other DNA
aatgttgttgatgcaaccataaagtgatatttaataattatttataagaagcaacttaaccacaaaacaaccatatattgatatctcacaaaacaaccataagttgatatttttgtgaatcgagtatttcagcaaaactactgcagtaagaa

SEQ ID NO: 3553 - DNA, 152 bp, synthetic construct
  source 1..152: mol_type = other DNA
aatgttgttgatgcaaccataaagtgatatttaataattatttatacgcagcaacttaaccacaaaacaaccatatattgatatctcacaaaacaaccataagttgatatttttgtgaatcgagtatttcagcaaaactactgcagtaagaa

SEQ ID NO: 3554 - DNA, 152 bp, synthetic construct
  source 1..152: mol_type = other DNA
aatgttgttgatgcaaccataaagtgatatttaataattatttatcctcagcaacttaaccacaaaacaaccatatattgatatctcacaaaacaaccataagttgatatttttgtgaatcgagtatttcagcaaaactactgcagtaagaa

SEQ ID NO: 3555 - DNA, 152 bp, synthetic construct
  source 1..152: mol_type = other DNA
aatgttgttgatgcaaccataaagtgatatttaataattatttagcatcagcaacttaaccacaaaacaaccatatattgatatctcacaaaacaaccataagttgatatttttgtgaatcgagtatttcagcaaaactactgcagtaagaa

SEQ ID NO: 3556 - DNA, 152 bp, synthetic construct
  source 1..152: mol_type = other DNA
aatgttgttgatgcaaccataaagtgatatttaataattatttcgaatcagcaacttaaccacaaaacaaccatatattgatatctcacaaaacaaccataagttgatatttttgtgaatcgagtatttcagcaaaactactgcagtaagaa

SEQ ID NO: 3557 - DNA, 152 bp, synthetic construct
  source 1..152: mol_type = other DNA
aatgttgttgatgcaaccataaagtgatatttaataattattgctaatcagcaacttaaccacaaaacaaccatatattgatatctcacaaaacaaccataagttgatatttttgtgaatcgagtatttcagcaaaactactgcagtaagaa

SEQ ID NO: 3558 - DNA, 152 bp, synthetic construct
  source 1..152: mol_type = other DNA
aatgttgttgatgcaaccataaagtgatatttaataattatggataatcagcaacttaaccacaaaacaaccatatattgatatctcacaaaacaaccataagttgatatttttgtgaatcgagtatttcagcaaaactactgcagtaagaa

SEQ ID NO: 3559 - DNA, 152 bp, synthetic construct
  source 1..152: mol_type = other DNA
aatgttgttgatgcaaccataaagtgatatttaataattaggtataatcagcaacttaaccacaaaacaaccatatattgatatctcacaaaacaaccataagttgatatttttgtgaatcgagtatttcagcaaaactactgcagtaagaa

SEQ ID NO: 3560 - DNA, 152 bp, synthetic construct
  source 1..152: mol_type = other DNA
aatgttgttgatgcaaccataaagtgatatttaataattcgttataatcagcaacttaaccacaaaacaaccatatattgatatctcacaaaacaaccataagttgatatttttgtgaatcgagtatttcagcaaaactactgcagtaagaa

SEQ ID NO: 3561 - DNA, 152 bp, synthetic construct
  source 1..152: mol_type = other DNA
aatgttgttgatgcaaccataaagtgatatttaataatgctttataatcagcaacttaaccacaaaacaaccatatattgatatctcacaaaacaaccataagttgatatttttgtgaatcgagtatttcagcaaaactactgcagtaagaa

SEQ ID NO: 3562 - DNA, 152 bp, synthetic construct
  source 1..152: mol_type = other DNA
aatgttgttgatgcaaccataaagtgatatttaataaggatttataatcagcaacttaaccacaaaacaaccatatattgatatctcacaaaacaaccataagttgatatttttgtgaatcgagtatttcagcaaaactactgcagtaagaa

SEQ ID NO: 3563 - DNA, 152 bp, synthetic construct
  source 1..152: mol_type = other DNA
aatgttgttgatgcaaccataaagtgatatttaatacgtatttataatcagcaacttaaccacaaaacaaccatatattgatatctcacaaaacaaccataagttgatatttttgtgaatcgagtatttcagcaaaactactgcagtaagaa

SEQ ID NO: 3564 - DNA, 152 bp, synthetic construct
  source 1..152: mol_type = other DNA
aatgttgttgatgcaaccataaagtgatatttaatccttatttataatcagcaacttaaccacaaaacaaccatatattgatatctcacaaaacaaccataagttgatatttttgtgaatcgagtatttcagcaaaactactgcagtaagaa

SEQ ID NO: 3565 - DNA, 152 bp, synthetic construct
  source 1..152: mol_type = other DNA
aatgttgttgatgcaaccataaagtgatatttaagcattatttataatcagcaacttaaccacaaaacaaccatatattgatatctcacaaaacaaccataagttgatatttttgtgaatcgagtatttcagcaaaactactgcagtaagaa

SEQ ID NO: 3566 - DNA, 152 bp, synthetic construct
  source 1..152: mol_type = other DNA
aatgttgttgatgcaaccataaagtgatatttacgaattatttataatcagcaacttaaccacaaaacaaccatatattgatatctcacaaaacaaccataagttgatatttttgtgaatcgagtatttcagcaaaactactgcagtaagaa

SEQ ID NO: 3567 - DNA, 152 bp, synthetic construct
  source 1..152: mol_type = other DNA
aatgttgttgatgcaaccataaagtgatatttcctaattatttataatcagcaacttaaccacaaaacaaccatatattgatatctcacaaaacaaccataagttgatatttttgtgaatcgagtatttcagcaaaactactgcagtaagaa

SEQ ID NO: 3568 - DNA, 152 bp, synthetic construct
  source 1..152: mol_type = other DNA
aatgttgttgatgcaaccataaagtgatattgcataattatttataatcagcaacttaaccacaaaacaaccatatattgatatctcacaaaacaaccataagttgatatttttgtgaatcgagtatttcagcaaaactactgcagtaagaa

SEQ ID NO: 3569 - DNA, 152 bp, synthetic construct
  source 1..152: mol_type = other DNA
aatgttgttgatgcaaccataaagtgatatggaataattatttataatcagcaacttaaccacaaaacaaccatatattgatatctcacaaaacaaccataagttgatatttttgtgaatcgagtatttcagcaaaactactgcagtaagaa

SEQ ID NO: 3570 - DNA, 152 bp, synthetic construct
  source 1..152: mol_type = other DNA
aatgttgttgatgcaaccataaagtgataggtaataattatttataatcagcaacttaaccacaaaacaaccatatattgatatctcacaaaacaaccataagttgatatttttgtgaatcgagtatttcagcaaaactactgcagtaagaa

SEQ ID NO: 3571 - DNA, 152 bp, synthetic construct
  source 1..152: mol_type = other DNA
aatgttgttgatgcaaccataaagtgatcgttaataattatttataatcagcaacttaaccacaaaacaaccatatattgatatctcacaaaacaaccataagttgatatttttgtgaatcgagtatttcagcaaaactactgcagtaagaa

SEQ ID NO: 3572 - DNA, 152 bp, synthetic construct
  source 1..152: mol_type = other DNA
aatgttgttgatgcaaccataaagtgagctttaataattatttataatcagcaacttaaccacaaaacaaccatatattgatatctcacaaaacaaccataagttgatatttttgtgaatcgagtatttcagcaaaactactgcagtaagaa

SEQ ID NO: 3573 - DNA, 152 bp, synthetic construct
  source 1..152: mol_type = other DNA
aatgttgttgatgcaaccataaagtgcgatttaataattatttataatcagcaacttaaccacaaaacaaccatatattgatatctcacaaaacaaccataagttgatatttttgtgaatcgagtatttcagcaaaactactgcagtaagaa

SEQ ID NO: 3574 - DNA, 152 bp, synthetic construct
  source 1..152: mol_type = other DNA
aatgttgttgatgcaaccataaagttctatttaataattatttataatcagcaacttaaccacaaaacaaccatatattgatatctcacaaaacaaccataagttgatatttttgtgaatcgagtatttcagcaaaactactgcagtaagaa

SEQ ID NO: 3575 - DNA, 152 bp, synthetic construct
  source 1..152: mol_type = other DNA
aatgttgttgatgcaaccataaaggtatatttaataattatttataatcagcaacttaaccacaaaacaaccatatattgatatctcacaaaacaaccataagttgatatttttgtgaatcgagtatttcagcaaaactactgcagtaagaa

SEQ ID NO: 3576 - DNA, 152 bp, synthetic construct
  source 1..152: mol_type = other DNA
aatgttgttgatgcaaccataaatggatatttaataattatttataatcagcaacttaaccacaaaacaaccatatattgatatctcacaaaacaaccataagttgatatttttgtgaatcgagtatttcagcaaaactactgcagtaagaa

SEQ ID NO: 3577 - DNA, 152 bp, synthetic construct
  source 1..152: mol_type = other DNA
aatgttgttgatgcaaccataacttgatatttaataattatttataatcagcaacttaaccacaaaacaaccatatattgatatctcacaaaacaaccataagttgatatttttgtgaatcgagtatttcagcaaaactactgcagtaagaa

SEQ ID NO: 3578 - DNA, 152 bp, synthetic construct
  source 1..152: mol_type = other DNA
aatgttgttgatgcaaccataccgtgatatttaataattatttataatcagcaacttaaccacaaaacaaccatatattgatatctcacaaaacaaccataagttgatatttttgtgaatcgagtatttcagcaaaactactgcagtaagaa

SEQ ID NO: 3579 - DNA, 152 bp, synthetic construct
  source 1..152: mol_type = other DNA
aatgttgttgatgcaaccatccagtgatatttaataattatttataatcagcaacttaaccacaaaacaaccatatattgatatctcacaaaacaaccataagttgatatttttgtgaatcgagtatttcagcaaaactactgcagtaagaa

SEQ ID NO: 3580 - DNA, 152 bp, synthetic construct
  source 1..152: mol_type = other DNA
aatgttgttgatgcaaccagcaagtgatatttaataattatttataatcagcaacttaaccacaaaacaaccatatattgatatctcacaaaacaaccataagttgatatttttgtgaatcgagtatttcagcaaaactactgcagtaagaa

SEQ ID NO: 3581 - DNA, 152 bp, synthetic construct
  source 1..152: mol_type = other DNA
aatgttgttgatgcaacccgaaagtgatatttaataattatttataatcagcaacttaaccacaaaacaaccatatattgatatctcacaaaacaaccataagttgatatttttgtgaatcgagtatttcagcaaaactactgcagtaagaa

SEQ ID NO: 3582 - DNA, 152 bp, synthetic construct
  source 1..152: mol_type = other DNA
aatgttgttgatgcaacactaaagtgatatttaataattatttataatcagcaacttaaccacaaaacaaccatatattgatatctcacaaaacaaccataagttgatatttttgtgaatcgagtatttcagcaaaactactgcagtaagaa

SEQ ID NO: 3583 - DNA, 152 bp, synthetic construct
  source 1..152: mol_type = other DNA
aatgttgttgatgcaaaaataaagtgatatttaataattatttataatcagcaacttaaccacaaaacaaccatatattgatatctcacaaaacaaccataagttgatatttttgtgaatcgagtatttcagcaaaactactgcagtaagaa

SEQ ID NO: 3584 - DNA, 152 bp, synthetic construct
  source 1..152: mol_type = other DNA
aatgttgttgatgcacacataaagtgatatttaataattatttataatcagcaacttaaccacaaaacaaccatatattgatatctcacaaaacaaccataagttgatatttttgtgaatcgagtatttcagcaaaactactgcagtaagaa

SEQ ID NO: 3585 - DNA, 152 bp, synthetic construct
  source 1..152: mol_type = other DNA
aatgttgttgatgcccccataaagtgatatttaataattatttataatcagcaacttaaccacaaaacaaccatatattgatatctcacaaaacaaccataagttgatatttttgtgaatcgagtatttcagcaaaactactgcagtaagaa

SEQ ID NO: 3586 - DNA, 152 bp, synthetic construct
  source 1..152: mol_type = other DNA
aatgttgttgatgacaccataaagtgatatttaataattatttataatcagcaacttaaccacaaaacaaccatatattgatatctcacaaaacaaccataagttgatatttttgtgaatcgagtatttcagcaaaactactgcagtaagaa

SEQ ID NO: 3587 - DNA, 152 bp, synthetic construct
  source 1..152: mol_type = other DNA
aatgttgttgattaaaccataaagtgatatttaataattatttataatcagcaacttaaccacaaaacaaccatatattgatatctcacaaaacaaccataagttgatatttttgtgaatcgagtatttcagcaaaactactgcagtaagaa

SEQ ID NO: 3588 - DNA, 152 bp, synthetic construct
  source 1..152: mol_type = other DNA
aatgttgttgagtcaaccataaagtgatatttaataattatttataatcagcaacttaaccacaaaacaaccatatattgatatctcacaaaacaaccataagttgatatttttgtgaatcgagtatttcagcaaaactactgcagtaagaa

SEQ ID NO: 3589 - DNA, 152 bp, synthetic construct
  source 1..152: mol_type = other DNA
aatgttgttgcggcaaccataaagtgatatttaataattatttataatcagcaacttaaccacaaaacaaccatatattgatatctcacaaaacaaccataagttgatatttttgtgaatcgagtatttcagcaaaactactgcagtaagaa

SEQ ID NO: 3590 - DNA, 152 bp, synthetic construct
  source 1..152: mol_type = other DNA
aatgttgtttctgcaaccataaagtgatatttaataattatttataatcagcaacttaaccacaaaacaaccatatattgatatctcacaaaacaaccataagttgatatttttgtgaatcgagtatttcagcaaaactactgcagtaagaa

SEQ ID NO: 3591 - DNA, 152 bp, synthetic construct
  source 1..152: mol_type = other DNA
aatgttgtgtatgcaaccataaagtgatatttaataattatttataatcagcaacttaaccacaaaacaaccatatattgatatctcacaaaacaaccataagttgatatttttgtgaatcgagtatttcagcaaaactactgcagtaagaa

SEQ ID NO: 3592 - DNA, 152 bp, synthetic construct
  source 1..152: mol_type = other DNA
aatgttggggatgcaaccataaagtgatatttaataattatttataatcagcaacttaaccacaaaacaaccatatattgatatctcacaaaacaaccataagttgatatttttgtgaatcgagtatttcagcaaaactactgcagtaagaa

SEQ ID NO: 3593 - DNA, 152 bp, synthetic construct
  source 1..152: mol_type = other DNA
aatgtttgtgatgcaaccataaagtgatatttaataattatttataatcagcaacttaaccacaaaacaaccatatattgatatctcacaaaacaaccataagttgatatttttgtgaatcgagtatttcagcaaaactactgcagtaagaa

SEQ ID NO: 3594 - DNA, 152 bp, synthetic construct
  source 1..152: mol_type = other DNA
aatgtgtttgatgcaaccataaagtgatatttaataattatttataatcagcaacttaaccacaaaacaaccatatattgatatctcacaaaacaaccataagttgatatttttgtgaatcgagtatttcagcaaaactactgcagtaagaa

SEQ ID NO: 3595 - DNA, 152 bp, synthetic construct
  source 1..152: mol_type = other DNA
aatggggttgatgcaaccataaagtgatatttaataattatttataatcagcaacttaaccacaaaacaaccatatattgatatctcacaaaacaaccataagttgatatttttgtgaatcgagtatttcagcaaaactactgcagtaagaa

SEQ ID NO: 3596 - DNA, 152 bp, synthetic construct
  source 1..152: mol_type = other DNA
aattgtgttgatgcaaccataaagtgatatttaataattatttataatcagcaacttaaccacaaaacaaccatatattgatatctcacaaaacaaccataagttgatatttttgtgaatcgagtatttcagcaaaactactgcagtaagaa

SEQ ID NO: 3597 - DNA, 152 bp, synthetic construct
  source 1..152: mol_type = other DNA
aagtttgttgatgcaaccataaagtgatatttaataattatttataatcagcaacttaaccacaaaacaaccatatattgatatctcacaaaacaaccataagttgatatttttgtgaatcgagtatttcagcaaaactactgcagtaagaa

SEQ ID NO: 3598 - DNA, 152 bp, synthetic construct
  source 1..152: mol_type = other DNA
acggttgttgatgcaaccataaagtgatatttaataattatttataatcagcaacttaaccacaaaacaaccatatattgatatctcacaaaacaaccataagttgatatttttgtgaatcgagtatttcagcaaaactactgcagtaagaa

SEQ ID NO: 3599 - DNA, 152 bp, synthetic construct
  source 1..152: mol_type = other DNA
cctgttgttgatgcaaccataaagtgatatttaataattatttataatcagcaacttaaccacaaaacaaccatatattgatatctcacaaaacaaccataagttgatatttttgtgaatcgagtatttcagcaaaactactgcagtaagaa

SEQ ID NO: 3600 - DNA, 152 bp, synthetic construct
  source 1..152: mol_type = other DNA
ccgtgtgttgatgcaaccataaagtgatatttaataattatttataatcagcaacttaaccacaaaacaaccatatattgatatctcacaaaacaaccataagttgatatttttgtgaatcgagtatttcagcaaaactactgcagtaagaa

SEQ ID NO: 3601 - DNA, 152 bp, synthetic construct
  source 1..152: mol_type = other DNA
aatgttgttgatgcaaccataaagtgatatttaataattatttataatcagcaacttaaccacaaaacaaccatatattgatatctcacaaaacaaccataagttgatatttttgtgatacgagtatttcagcaaaactactgcagtaagaa

SEQ ID NO: 3602 - DNA, 152 bp, synthetic construct
  source 1..152: mol_type = other DNA
aatgttgttgatgcaaccataaagtgatatttaataattatttataatcagcaacttaaccacaaaacaaccatatattgatatctcacaaaacaaccataagttgatatttttgtgtttcgagtatttcagcaaaactactgcagtaagaa

SEQ ID NO: 3603 - DNA, 152 bp, synthetic construct
  source 1..152: mol_type = other DNA
aatgttgttgatgcaaccataaagtgatatttaataattatttataatcagcaacttaaccacaaaacaaccatatattgatatctcacaaaacaaccataagttgatatttttgtctatcgagtatttcagcaaaactactgcagtaagaa

SEQ ID NO: 3604 - DNA, 152 bp, synthetic construct
  source 1..152: mol_type = other DNA
aatgttgttgatgcaaccataaagtgatatttaataattatttataatcagcaacttaaccacaaaacaaccatatattgatatctcacaaaacaaccataagttgatatttttgacaatcgagtatttcagcaaaactactgcagtaagaa

SEQ ID NO: 3605 - DNA, 152 bp, synthetic construct
  source 1..152: mol_type = other DNA
aatgttgttgatgcaaccataaagtgatatttaataattatttataatcagcaacttaaccacaaaacaaccatatattgatatctcacaaaacaaccataagttgatatttttcagaatcgagtatttcagcaaaactactgcagtaagaa

SEQ ID NO: 3606 - DNA, 152 bp, synthetic construct
  source 1..152: mol_type = other DNA
aatgttgttgatgcaaccataaagtgatatttaataattatttataatcagcaacttaaccacaaaacaaccatatattgatatctcacaaaacaaccataagttgatattttactgaatcgagtatttcagcaaaactactgcagtaagaa

SEQ ID NO: 3607 - DNA, 152 bp, synthetic construct
  source 1..152: mol_type = other DNA
aatgttgttgatgcaaccataaagtgatatttaataattatttataatcagcaacttaaccacaaaacaaccatatattgatatctcacaaaacaaccataagttgatatttaagtgaatcgagtatttcagcaaaactactgcagtaagaa

SEQ ID NO: 3608 - DNA, 152 bp, synthetic construct
  source 1..152: mol_type = other DNA
aatgttgttgatgcaaccataaagtgatatttaataattatttataatcagcaacttaaccacaaaacaaccatatattgatatctcacaaaacaaccataagttgatattaatgtgaatcgagtatttcagcaaaactactgcagtaagaa

SEQ ID NO: 3609 - DNA, 152 bp, synthetic construct
  source 1..152: mol_type = other DNA
aatgttgttgatgcaaccataaagtgatatttaataattatttataatcagcaacttaaccacaaaacaaccatatattgatatctcacaaaacaaccataagttgatataattgtgaatcgagtatttcagcaaaactactgcagtaagaa

SEQ ID NO: 3610 - DNA, 152 bp, synthetic construct
  source 1..152: mol_type = other DNA
aatgttgttgatgcaaccataaagtgatatttaataattatttataatcagcaacttaaccacaaaacaaccatatattgatatctcacaaaacaaccataagttgataaatttgtgaatcgagtatttcagcaaaactactgcagtaagaa

SEQ ID NO: 3611 - DNA, 152 bp, synthetic construct
  source 1..152: mol_type = other DNA
aatgttgttgatgcaaccataaagtgatatttaataattatttataatcagcaacttaaccacaaaacaaccatatattgatatctcacaaaacaaccataagttgattattttgtgaatcgagtatttcagcaaaactactgcagtaagaa

SEQ ID NO: 3612 - DNA, 152 bp, synthetic construct
  source 1..152: mol_type = other DNA
aatgttgttgatgcaaccataaagtgatatttaataattatttataatcagcaacttaaccacaaaacaaccatatattgatatctcacaaaacaaccataagttgaattttttgtgaatcgagtatttcagcaaaactactgcagtaagaa

SEQ ID NO: 3613 - DNA, 152 bp, synthetic construct
  source 1..152: mol_type = other DNA
aatgttgttgatgcaaccataaagtgatatttaataattatttataatcagcaacttaaccacaaaacaaccatatattgatatctcacaaaacaaccataagttgtaatttttgtgaatcgagtatttcagcaaaactactgcagtaagaa

SEQ ID NO: 3614 - DNA, 152 bp, synthetic construct
  source 1..152: mol_type = other DNA
aatgttgttgatgcaaccataaagtgatatttaataattatttataatcagcaacttaaccacaaaacaaccatatattgatatctcacaaaacaaccataagttcttatttttgtgaatcgagtatttcagcaaaactactgcagtaagaa

SEQ ID NO: 3615 - DNA, 152 bp, synthetic construct
  source 1..152: mol_type = other DNA
aatgttgttgatgcaaccataaagtgatatttaataattatttataatcagcaacttaaccacaaaacaaccatatattgatatctcacaaaacaaccataagtacatatttttgtgaatcgagtatttcagcaaaactactgcagtaagaa

SEQ ID NO: 3616 - DNA, 152 bp, synthetic construct
  source 1..152: mol_type = other DNA
aatgttgttgatgcaaccataaagtgatatttaataattatttataatcagcaacttaaccacaaaacaaccatatattgatatctcacaaaacaaccataagaagatatttttgtgaatcgagtatttcagcaaaactactgcagtaagaa

SEQ ID NO: 3617 - DNA, 152 bp, synthetic construct
  source 1..152: mol_type = other DNA
aatgttgttgatgcaaccataaagtgatatttaataattatttataatcagcaacttaaccacaaaacaaccatatattgatatctcacaaaacaaccataacatgatatttttgtgaatcgagtatttcagcaaaactactgcagtaagaa

SEQ ID NO: 3618 - DNA, 152 bp, synthetic construct
  source 1..152: mol_type = other DNA
aatgttgttgatgcaaccataaagtgatatttaataattatttataatcagcaacttaaccacaaaacaaccatatattgatatctcacaaaacaaccatatcttgatatttttgtgaatcgagtatttcagcaaaactactgcagtaagaa

SEQ ID NO: 3619 - DNA, 152 bp, synthetic construct
  source 1..152: mol_type = other DNA
aatgttgttgatgcaaccataaagtgatatttaataattatttataatcagcaacttaaccacaaaacaaccatatattgatatctcacaaaacaaccatttgttgatatttttgtgaatcgagtatttcagcaaaactactgcagtaagaa

SEQ ID NO: 3620 - DNA, 152 bp, synthetic construct
  source 1..152: mol_type = other DNA
aatgttgttgatgcaaccataaagtgatatttaataattatttataatcagcaacttaaccacaaaacaaccatatattgatatctcacaaaacaaccaatagttgatatttttgtgaatcgagtatttcagcaaaactactgcagtaagaa

SEQ ID NO: 3621 - DNA, 152 bp, synthetic construct
  source 1..152: mol_type = other DNA
aatgttgttgatgcaaccataaagtgatatttaataattatttataatcagcaacttaaccacaaaacaaccatatattgatatctcacaaaacaacctaaagttgatatttttgtgaatcgagtatttcagcaaaactactgcagtaagaa

SEQ ID NO: 3622 - DNA, 152 bp, synthetic construct
  source 1..152: mol_type = other DNA
aatgttgttgatgcaaccataaagtgatatttaataattatttataatcagcaacttaaccacaaaacaaccatatattgatatctcacaaaacaacgttaagttgatatttttgtgaatcgagtatttcagcaaaactactgcagtaagaa

SEQ ID NO: 3623 - DNA, 152 bp, synthetic construct
  source 1..152: mol_type = other DNA
aatgttgttgatgcaaccataaagtgatatttaataattatttataatcagcaacttaaccacaaaacaaccatatattgatatctcacaaaacaaggataagttgatatttttgtgaatcgagtatttcagcaaaactactgcagtaagaa

SEQ ID NO: 3624 - DNA, 152 bp, synthetic construct
  source 1..152: mol_type = other DNA
aatgttgttgatgcaaccataaagtgatatttaataattatttataatcagcaacttaaccacaaaacaaccatatattgatatctcacaaaacatgcataagttgatatttttgtgaatcgagtatttcagcaaaactactgcagtaagaa

SEQ ID NO: 3625 - DNA, 152 bp, synthetic construct
  source 1..152: mol_type = other DNA
aatgttgttgatgcaaccataaagtgatatttaataattatttataatcagcaacttaaccacaaaacaaccatatattgatatctcacaaaacttccataagttgatatttttgtgaatcgagtatttcagcaaaactactgcagtaagaa

SEQ ID NO: 3626 - DNA, 152 bp, synthetic construct
  source 1..152: mol_type = other DNA
aatgttgttgatgcaaccataaagtgatatttaataattatttataatcagcaacttaaccacaaaacaaccatatattgatatctcacaaaagtaccataagttgatatttttgtgaatcgagtatttcagcaaaactactgcagtaagaa

SEQ ID NO: 3627 - DNA, 152 bp, synthetic construct
  source 1..152: mol_type = other DNA
aatgttgttgatgcaaccataaagtgatatttaataattatttataatcagcaacttaaccacaaaacaaccatatattgatatctcacaaatgaaccataagttgatatttttgtgaatcgagtatttcagcaaaactactgcagtaagaa

SEQ ID NO: 3628 - DNA, 152 bp, synthetic construct
  source 1..152: mol_type = other DNA
aatgttgttgatgcaaccataaagtgatatttaataattatttataatcagcaacttaaccacaaaacaaccatatattgatatctcacaattcaaccataagttgatatttttgtgaatcgagtatttcagcaaaactactgcagtaagaa

SEQ ID NO: 3629 - DNA, 152 bp, synthetic construct
  source 1..152: mol_type = other DNA
aatgttgttgatgcaaccataaagtgatatttaataattatttataatcagcaacttaaccacaaaacaaccatatattgatatctcacattacaaccataagttgatatttttgtgaatcgagtatttcagcaaaactactgcagtaagaa

SEQ ID NO: 3630 - DNA, 152 bp, synthetic construct
  source 1..152: mol_type = other DNA
aatgttgttgatgcaaccataaagtgatatttaataattatttataatcagcaacttaaccacaaaacaaccatatattgatatctcacttaacaaccataagttgatatttttgtgaatcgagtatttcagcaaaactactgcagtaagaa

SEQ ID NO: 3631 - DNA, 152 bp, synthetic construct
  source 1..152: mol_type = other DNA
aatgttgttgatgcaaccataaagtgatatttaataattatttataatcagcaacttaaccacaaaacaaccatatattgatatctcagtaaacaaccataagttgatatttttgtgaatcgagtatttcagcaaaactactgcagtaagaa

SEQ ID NO: 3632 - DNA, 152 bp, synthetic construct
  source 1..152: mol_type = other DNA
aatgttgttgatgcaaccataaagtgatatttaataattatttataatcagcaacttaaccacaaaacaaccatatattgatatctctgaaaacaaccataagttgatatttttgtgaatcgagtatttcagcaaaactactgcagtaagaa

SEQ ID NO: 3633 - DNA, 152 bp, synthetic construct
  source 1..152: mol_type = other DNA
aatgttgttgatgcaaccataaagtgatatttaataattatttataatcagcaacttaaccacaaaacaaccatatattgatatctgtcaaaacaaccataagttgatatttttgtgaatcgagtatttcagcaaaactactgcagtaagaa

SEQ ID NO: 3634 - DNA, 152 bp, synthetic construct
  source 1..152: mol_type = other DNA
aatgttgttgatgcaaccataaagtgatatttaataattatttataatcagcaacttaaccacaaaacaaccatatattgatatcagacaaaacaaccataagttgatatttttgtgaatcgagtatttcagcaaaactactgcagtaagaa

SEQ ID NO: 3635 - DNA, 152 bp, synthetic construct
  source 1..152: mol_type = other DNA
aatgttgttgatgcaaccataaagtgatatttaataattatttataatcagcaacttaaccacaaaacaaccatatattgatatgacacaaaacaaccataagttgatatttttgtgaatcgagtatttcagcaaaactactgcagtaagaa

SEQ ID NO: 3636 - DNA, 152 bp, synthetic construct
  source 1..152: mol_type = other DNA
aatgttgttgatgcaaccataaagtgatatttaataattatttataatcagcaacttaaccacaaaacaaccatatattgataagtcacaaaacaaccataagttgatatttttgtgaatcgagtatttcagcaaaactactgcagtaagaa

SEQ ID NO: 3637 - DNA, 152 bp, synthetic construct
  source 1..152: mol_type = other DNA
aatgttgttgatgcaaccataaagtgatatttaataattatttataatcagcaacttaaccacaaaacaaccatatattgattactcacaaaacaaccataagttgatatttttgtgaatcgagtatttcagcaaaactactgcagtaagaa

SEQ ID NO: 3638 - DNA, 152 bp, synthetic construct
  source 1..152: mol_type = other DNA
aatgttgttgatgcaaccataaagtgatatttaataattatttataatcagcaacttaaccacaaaacaaccatatattgaattctcacaaaacaaccataagttgatatttttgtgaatcgagtatttcagcaaaactactgcagtaagaa

SEQ ID NO: 3639 - DNA, 152 bp, synthetic construct
  source 1..152: mol_type = other DNA
aatgttgttgatgcaaccataaagtgatatttaataattatttataatcagcaacttaaccacaaaacaaccatatattgtaatctcacaaaacaaccataagttgatatttttgtgaatcgagtatttcagcaaaactactgcagtaagaa

SEQ ID NO: 3640 - DNA, 152 bp, synthetic construct
  source 1..152: mol_type = other DNA
aatgttgttgatgcaaccataaagtgatatttaataattatttataatcagcaacttaaccacaaaacaaccatatattcttatctcacaaaacaaccataagttgatatttttgtgaatcgagtatttcagcaaaactactgcagtaagaa

SEQ ID NO: 3641 - DNA, 152 bp, synthetic construct
  source 1..152: mol_type = other DNA
aatgttgttgatgcaaccataaagtgatatttaataattatttataatcagcaacttaaccacaaaacaaccatatatacatatctcacaaaacaaccataagttgatatttttgtgaatcgagtatttcagcaaaactactgcagtaagaa

SEQ ID NO: 3642 - DNA, 152 bp, synthetic construct
  source 1..152: mol_type = other DNA
aatgttgttgatgcaaccataaagtgatatttaataattatttataatcagcaacttaaccacaaaacaaccatataaagatatctcacaaaacaaccataagttgatatttttgtgaatcgagtatttcagcaaaactactgcagtaagaa

SEQ ID NO: 3643 - DNA, 152 bp, synthetic construct
  source 1..152: mol_type = other DNA
aatgttgttgatgcaaccataaagtgatatttaataattatttataatcagcaacttaaccacaaaacaaccatattatgatatctcacaaaacaaccataagttgatatttttgtgaatcgagtatttcagcaaaactactgcagtaagaa

SEQ ID NO: 3644 - DNA, 152 bp, synthetic construct
  source 1..152: mol_type = other DNA
aatgttgttgatgcaaccataaagtgatatttaataattatttataatcagcaacttaaccacaaaacaaccataatttgatatctcacaaaacaaccataagttgatatttttgtgaatcgagtatttcagcaaaactactgcagtaagaa

SEQ ID NO: 3645 - DNA, 152 bp, synthetic construct
  source 1..152: mol_type = other DNA
aatgttgttgatgcaaccataaagtgatatttaataattatttataatcagcaacttaaccacaaaacaaccattaattgatatctcacaaaacaaccataagttgatatttttgtgaatcgagtatttcagcaaaactactgcagtaagaa

SEQ ID NO: 3646 - DNA, 152 bp, synthetic construct
  source 1..152: mol_type = other DNA
aatgttgttgatgcaaccataaagtgatatttaataattatttataatcagcaacttaaccacaaaacaaccaattattgatatctcacaaaacaaccataagttgatatttttgtgaatcgagtatttcagcaaaactactgcagtaagaa

SEQ ID NO: 3647 - DNA, 152 bp, synthetic construct
  source 1..152: mol_type = other DNA
aatgttgttgatgcaaccataaagtgatatttaataattatttataatcagcaacttaaccacaaaacaacctaatattgatatctcacaaaacaaccataagttgatatttttgtgaatcgagtatttcagcaaaactactgcagtaagaa

SEQ ID NO: 3648 - DNA, 152 bp, synthetic construct
  source 1..152: mol_type = other DNA
aatgttgttgatgcaaccataaagtgatatttaataattatttataatcagcaacttaaccacaaaacaacgttatattgatatctcacaaaacaaccataagttgatatttttgtgaatcgagtatttcagcaaaactactgcagtaagaa

SEQ ID NO: 3649 - DNA, 152 bp, synthetic construct
  source 1..152: mol_type = other DNA
aatgttgttgatgcaaccataaagtgatatttaataattatttataatcagcaacttaaccacaaaacaaggatatattgatatctcacaaaacaaccataagttgatatttttgtgaatcgagtatttcagcaaaactactgcagtaagaa

SEQ ID NO: 3650 - DNA, 152 bp, synthetic construct
  source 1..152: mol_type = other DNA
aatgttgttgatgcaaccataaagtgatatttaataattatttataatcagcaacttaaccacaaaacatgcatatattgatatctcacaaaacaaccataagttgatatttttgtgaatcgagtatttcagcaaaactactgcagtaagaa

SEQ ID NO: 3651 - DNA, 152 bp, synthetic construct
  source 1..152: mol_type = other DNA
aatgttgttgatgcaaccataaagtgatatttaataattatttataatcagcaacttaaccacaaaacttccatatattgatatctcacaaaacaaccataagttgatatttttgtgaatcgagtatttcagcaaaactactgcagtaagaa

SEQ ID NO: 3652 - DNA, 152 bp, synthetic construct
  source 1..152: mol_type = other DNA
aatgttgttgatgcaaccataaagtgatatttaataattatttataatcagcaacttaaccacaaaagtaccatatattgatatctcacaaaacaaccataagttgatatttttgtgaatcgagtatttcagcaaaactactgcagtaagaa

SEQ ID NO: 3653 - DNA, 152 bp, synthetic construct
  source 1..152: mol_type = other DNA
aatgttgttgatgcaaccataaagtgatatttaataattatttataatcagcaacttaaccacaaatgaaccatatattgatatctcacaaaacaaccataagttgatatttttgtgaatcgagtatttcagcaaaactactgcagtaagaa

SEQ ID NO: 3654 - DNA, 152 bp, synthetic construct
  source 1..152: mol_type = other DNA
aatgttgttgatgcaaccataaagtgatatttaataattatttataatcagcaacttaaccacaattcaaccatatattgatatctcacaaaacaaccataagttgatatttttgtgaatcgagtatttcagcaaaactactgcagtaagaa

SEQ ID NO: 3655 - DNA, 152 bp, synthetic construct
  source 1..152: mol_type = other DNA
aatgttgttgatgcaaccataaagtgatatttaataattatttataatcagcaacttaaccacattacaaccatatattgatatctcacaaaacaaccataagttgatatttttgtgaatcgagtatttcagcaaaactactgcagtaagaa

SEQ ID NO: 3656 - DNA, 152 bp, synthetic construct
  source 1..152: mol_type = other DNA
aatgttgttgatgcaaccataaagtgatatttaataattatttataatcagcaacttaaccacttaacaaccatatattgatatctcacaaaacaaccataagttgatatttttgtgaatcgagtatttcagcaaaactactgcagtaagaa

SEQ ID NO: 3657 - DNA, 152 bp, synthetic construct
  source 1..152: mol_type = other DNA
aatgttgttgatgcaaccataaagtgatatttaataattatttataatcagcaacttaaccagtaaacaaccatatattgatatctcacaaaacaaccataagttgatatttttgtgaatcgagtatttcagcaaaactactgcagtaagaa

SEQ ID NO: 3658 - DNA, 152 bp, synthetic construct
  source 1..152: mol_type = other DNA
aatgttgttgatgcaaccataaagtgatatttaataattatttataatcagcaacttaacctgaaaacaaccatatattgatatctcacaaaacaaccataagttgatatttttgtgaatcgagtatttcagcaaaactactgcagtaagaa

SEQ ID NO: 3659 - DNA, 152 bp, synthetic construct
  source 1..152: mol_type = other DNA
aatgttgttgatgcaaccataaagtgatatttaataattatttataatcagcaacttaacgtcaaaacaaccatatattgatatctcacaaaacaaccataagttgatatttttgtgaatcgagtatttcagcaaaactactgcagtaagaa

SEQ ID NO: 3660 - DNA, 152 bp, synthetic construct
  source 1..152: mol_type = other DNA
aatgttgttgatgcaaccataaagtgatatttaataattatttataatcagcaacttaaggacaaaacaaccatatattgatatctcacaaaacaaccataagttgatatttttgtgaatcgagtatttcagcaaaactactgcagtaagaa

SEQ ID NO: 3661 - DNA, 152 bp, synthetic construct
  source 1..152: mol_type = other DNA
aatgttgttgatgcaaccataaagtgatatttaataattatttataatcagcaacttatgcacaaaacaaccatatattgatatctcacaaaacaaccataagttgatatttttgtgaatcgagtatttcagcaaaactactgcagtaagaa

SEQ ID NO: 3662 - DNA, 152 bp, synthetic construct
  source 1..152: mol_type = other DNA
aatgttgttgatgcaaccataaagtgatatttaataattatttataatcagcaacttttccacaaaacaaccatatattgatatctcacaaaacaaccataagttgatatttttgtgaatcgagtatttcagcaaaactactgcagtaagaa

SEQ ID NO: 3663 - DNA, 152 bp, synthetic construct
  source 1..152: mol_type = other DNA
aatgttgttgatgcaaccataaagtgatatttaataattatttataatcagcaactataccacaaaacaaccatatattgatatctcacaaaacaaccataagttgatatttttgtgaatcgagtatttcagcaaaactactgcagtaagaa

SEQ ID NO: 3664 - DNA, 152 bp, synthetic construct
  source 1..152: mol_type = other DNA
aatgttgttgatgcaaccataaagtgatatttaataattatttataatcagcaacaaaaccacaaaacaaccatatattgatatctcacaaaacaaccataagttgatatttttgtgaatcgagtatttcagcaaaactactgcagtaagaa

SEQ ID NO: 3665 - DNA, 152 bp, synthetic construct
  source 1..152: mol_type = other DNA
aatgttgttgatgcaaccataaagtgatatttaataattatttataatcagcaagataaccacaaaacaaccatatattgatatctcacaaaacaaccataagttgatatttttgtgaatcgagtatttcagcaaaactactgcagtaagaa

SEQ ID NO: 3666 - DNA, 152 bp, synthetic construct
  source 1..152: mol_type = other DNA
aatgttgttgatgcaaccataaagtgatatttaataattatttataatcagcatgttaaccacaaaacaaccatatattgatatctcacaaaacaaccataagttgatatttttgtgaatcgagtatttcagcaaaactactgcagtaagaa

SEQ ID NO: 3667 - DNA, 152 bp, synthetic construct
  source 1..152: mol_type = other DNA
aatgttgttgatgcaaccataaagtgatatttaataattatttataatcagcttcttaaccacaaaacaaccatatattgatatctcacaaaacaaccataagttgatatttttgtgaatcgagtatttcagcaaaactactgcagtaagaa

SEQ ID NO: 3668 - DNA, 152 bp, synthetic construct
  source 1..152: mol_type = other DNA
aatgttgttgatgcaaccataaagtgatatttaataattatttataatcaggtacttaaccacaaaacaaccatatattgatatctcacaaaacaaccataagttgatatttttgtgaatcgagtatttcagcaaaactactgcagtaagaa

SEQ ID NO: 3669 - DNA, 152 bp, synthetic construct
  source 1..152: mol_type = other DNA
aatgttgttgatgcaaccataaagtgatatttaataattatttataatcacgaacttaaccacaaaacaaccatatattgatatctcacaaaacaaccataagttgatatttttgtgaatcgagtatttcagcaaaactactgcagtaagaa

SEQ ID NO: 3670 - DNA, 152 bp, synthetic construct
  source 1..152: mol_type = other DNA
aatgttgttgatgcaaccataaagtgatatttaataattatttataatctccaacttaaccacaaaacaaccatatattgatatctcacaaaacaaccataagttgatatttttgtgaatcgagtatttcagcaaaactactgcagtaagaa

SEQ ID NO: 3671 - DNA, 152 bp, synthetic construct
  source 1..152: mol_type = other DNA
aatgttgttgatgcaaccataaagtgatatttaataattatttataatgtgcaacttaaccacaaaacaaccatatattgatatctcacaaaacaaccataagttgatatttttgtgaatcgagtatttcagcaaaactactgcagtaagaa

SEQ ID NO: 3672 - DNA, 152 bp, synthetic construct
  source 1..152: mol_type = other DNA
aatgttgttgatgcaaccataaagtgatatttaataattatttataaagagcaacttaaccacaaaacaaccatatattgatatctcacaaaacaaccataagttgatatttttgtgaatcgagtatttcagcaaaactactgcagtaagaa

SEQ ID NO: 3673 - DNA, 152 bp, synthetic construct
  source 1..152: mol_type = other DNA
aatgttgttgatgcaaccataaagtgatatttaataattatttatatacagcaacttaaccacaaaacaaccatatattgatatctcacaaaacaaccataagttgatatttttgtgaatcgagtatttcagcaaaactactgcagtaagaa

SEQ ID NO: 3674 - DNA, 152 bp, synthetic construct
  source 1..152: mol_type = other DNA
aatgttgttgatgcaaccataaagtgatatttaataattatttattttcagcaacttaaccacaaaacaaccatatattgatatctcacaaaacaaccataagttgatatttttgtgaatcgagtatttcagcaaaactactgcagtaagaa

SEQ ID NO: 3675 - DNA, 152 bp, synthetic construct
  source 1..152: mol_type = other DNA
aatgttgttgatgcaaccataaagtgatatttaataattatttaatatcagcaacttaaccacaaaacaaccatatattgatatctcacaaaacaaccataagttgatatttttgtgaatcgagtatttcagcaaaactactgcagtaagaa

SEQ ID NO: 3676 - DNA, 152 bp, synthetic construct
  source 1..152: mol_type = other DNA
aatgttgttgatgcaaccataaagtgatatttaataattattttaaatcagcaacttaaccacaaaacaaccatatattgatatctcacaaaacaaccataagttgatatttttgtgaatcgagtatttcagcaaaactactgcagtaagaa

SEQ ID NO: 3677 - DNA, 152 bp, synthetic construct
  source 1..152: mol_type = other DNA
aatgttgttgatgcaaccataaagtgatatttaataattattattaatcagcaacttaaccacaaaacaaccatatattgatatctcacaaaacaaccataagttgatatttttgtgaatcgagtatttcagcaaaactactgcagtaagaa

SEQ ID NO: 3678 - DNA, 152 bp, synthetic construct
  source 1..152: mol_type = other DNA
aatgttgttgatgcaaccataaagtgatatttaataattataaataatcagcaacttaaccacaaaacaaccatatattgatatctcacaaaacaaccataagttgatatttttgtgaatcgagtatttcagcaaaactactgcagtaagaa

SEQ ID NO: 3679 - DNA, 152 bp, synthetic construct
  source 1..152: mol_type = other DNA
aatgttgttgatgcaaccataaagtgatatttaataattaaatataatcagcaacttaaccacaaaacaaccatatattgatatctcacaaaacaaccataagttgatatttttgtgaatcgagtatttcagcaaaactactgcagtaagaa

SEQ ID NO: 3680 - DNA, 152 bp, synthetic construct
  source 1..152: mol_type = other DNA
aatgttgttgatgcaaccataaagtgatatttaataatttattataatcagcaacttaaccacaaaacaaccatatattgatatctcacaaaacaaccataagttgatatttttgtgaatcgagtatttcagcaaaactactgcagtaagaa

SEQ ID NO: 3681 - DNA, 152 bp, synthetic construct
  source 1..152: mol_type = other DNA
aatgttgttgatgcaaccataaagtgatatttaataatattttataatcagcaacttaaccacaaaacaaccatatattgatatctcacaaaacaaccataagttgatatttttgtgaatcgagtatttcagcaaaactactgcagtaagaa

SEQ ID NO: 3682 - DNA, 152 bp, synthetic construct
  source 1..152: mol_type = other DNA
aatgttgttgatgcaaccataaagtgatatttaataaaaatttataatcagcaacttaaccacaaaacaaccatatattgatatctcacaaaacaaccataagttgatatttttgtgaatcgagtatttcagcaaaactactgcagtaagaa

SEQ ID NO: 3683 - DNA, 152 bp, synthetic construct
  source 1..152: mol_type = other DNA
aatgttgttgatgcaaccataaagtgatatttaatatatatttataatcagcaacttaaccacaaaacaaccatatattgatatctcacaaaacaaccataagttgatatttttgtgaatcgagtatttcagcaaaactactgcagtaagaa

SEQ ID NO: 3684 - DNA, 152 bp, synthetic construct
  source 1..152: mol_type = other DNA
aatgttgttgatgcaaccataaagtgatatttaatttttatttataatcagcaacttaaccacaaaacaaccatatattgatatctcacaaaacaaccataagttgatatttttgtgaatcgagtatttcagcaaaactactgcagtaagaa

SEQ ID NO: 3685 - DNA, 152 bp, synthetic construct
  source 1..152: mol_type = other DNA
aatgttgttgatgcaaccataaagtgatatttaaatattatttataatcagcaacttaaccacaaaacaaccatatattgatatctcacaaaacaaccataagttgatatttttgtgaatcgagtatttcagcaaaactactgcagtaagaa

SEQ ID NO: 3686 - DNA, 152 bp, synthetic construct
  source 1..152: mol_type = other DNA
aatgttgttgatgcaaccataaagtgatatttataaattatttataatcagcaacttaaccacaaaacaaccatatattgatatctcacaaaacaaccataagttgatatttttgtgaatcgagtatttcagcaaaactactgcagtaagaa

SEQ ID NO: 3687 - DNA, 152 bp, synthetic construct
  source 1..152: mol_type = other DNA
aatgttgttgatgcaaccataaagtgatattttttaattatttataatcagcaacttaaccacaaaacaaccatatattgatatctcacaaaacaaccataagttgatatttttgtgaatcgagtatttcagcaaaactactgcagtaagaa

SEQ ID NO: 3688 - DNA, 152 bp, synthetic construct
  source 1..152: mol_type = other DNA
aatgttgttgatgcaaccataaagtgatattatataattatttataatcagcaacttaaccacaaaacaaccatatattgatatctcacaaaacaaccataagttgatatttttgtgaatcgagtatttcagcaaaactactgcagtaagaa

SEQ ID NO: 3689 - DNA, 152 bp, synthetic construct
  source 1..152: mol_type = other DNA
aatgttgttgatgcaaccataaagtgatataaaataattatttataatcagcaacttaaccacaaaacaaccatatattgatatctcacaaaacaaccataagttgatatttttgtgaatcgagtatttcagcaaaactactgcagtaagaa

SEQ ID NO: 3690 - DNA, 152 bp, synthetic construct
  source 1..152: mol_type = other DNA
aatgttgttgatgcaaccataaagtgataaataataattatttataatcagcaacttaaccacaaaacaaccatatattgatatctcacaaaacaaccataagttgatatttttgtgaatcgagtatttcagcaaaactactgcagtaagaa

SEQ ID NO: 3691 - DNA, 152 bp, synthetic construct
  source 1..152: mol_type = other DNA
aatgttgttgatgcaaccataaagtgattattaataattatttataatcagcaacttaaccacaaaacaaccatatattgatatctcacaaaacaaccataagttgatatttttgtgaatcgagtatttcagcaaaactactgcagtaagaa

SEQ ID NO: 3692 - DNA, 152 bp, synthetic construct
  source 1..152: mol_type = other DNA
aatgttgttgatgcaaccataaagtgaattttaataattatttataatcagcaacttaaccacaaaacaaccatatattgatatctcacaaaacaaccataagttgatatttttgtgaatcgagtatttcagcaaaactactgcagtaagaa

SEQ ID NO: 3693 - DNA, 152 bp, synthetic construct
  source 1..152: mol_type = other DNA
aatgttgttgatgcaaccataaagtgtaatttaataattatttataatcagcaacttaaccacaaaacaaccatatattgatatctcacaaaacaaccataagttgatatttttgtgaatcgagtatttcagcaaaactactgcagtaagaa

SEQ ID NO: 3694 - DNA, 152 bp, synthetic construct
  source 1..152: mol_type = other DNA
aatgttgttgatgcaaccataaagtcttatttaataattatttataatcagcaacttaaccacaaaacaaccatatattgatatctcacaaaacaaccataagttgatatttttgtgaatcgagtatttcagcaaaactactgcagtaagaa

SEQ ID NO: 3695 - DNA, 152 bp, synthetic construct
  source 1..152: mol_type = other DNA
aatgttgttgatgcaaccataaagacatatttaataattatttataatcagcaacttaaccacaaaacaaccatatattgatatctcacaaaacaaccataagttgatatttttgtgaatcgagtatttcagcaaaactactgcagtaagaa

SEQ ID NO: 3696 - DNA, 152 bp, synthetic construct
  source 1..152: mol_type = other DNA
aatgttgttgatgcaaccataaacagatatttaataattatttataatcagcaacttaaccacaaaacaaccatatattgatatctcacaaaacaaccataagttgatatttttgtgaatcgagtatttcagcaaaactactgcagtaagaa

SEQ ID NO: 3697 - DNA, 152 bp, synthetic construct
  source 1..152: mol_type = other DNA
aatgttgttgatgcaaccataatctgatatttaataattatttataatcagcaacttaaccacaaaacaaccatatattgatatctcacaaaacaaccataagttgatatttttgtgaatcgagtatttcagcaaaactactgcagtaagaa

SEQ ID NO: 3698 - DNA, 152 bp, synthetic construct
  source 1..152: mol_type = other DNA
aatgttgttgatgcaaccatattgtgatatttaataattatttataatcagcaacttaaccacaaaacaaccatatattgatatctcacaaaacaaccataagttgatatttttgtgaatcgagtatttcagcaaaactactgcagtaagaa

SEQ ID NO: 3699 - DNA, 152 bp, synthetic construct
  source 1..152: mol_type = other DNA
aatgttgttgatgcaaccatttagtgatatttaataattatttataatcagcaacttaaccacaaaacaaccatatattgatatctcacaaaacaaccataagttgatatttttgtgaatcgagtatttcagcaaaactactgcagtaagaa

SEQ ID NO: 3700 - DNA, 152 bp, synthetic construct
  source 1..152: mol_type = other DNA
aatgttgttgatgcaaccaataagtgatatttaataattatttataatcagcaacttaaccacaaaacaaccatatattgatatctcacaaaacaaccataagttgatatttttgtgaatcgagtatttcagcaaaactactgcagtaagaa

SEQ ID NO: 3701 - DNA, 152 bp, synthetic construct
  source 1..152: mol_type = other DNA
aatgttgttgatgcaacctaaaagtgatatttaataattatttataatcagcaacttaaccacaaaacaaccatatattgatatctcacaaaacaaccataagttgatatttttgtgaatcgagtatttcagcaaaactactgcagtaagaa

SEQ ID NO: 3702 - DNA, 152 bp, synthetic construct
  source 1..152: mol_type = other DNA
aatgttgttgatgcaacgttaaagtgatatttaataattatttataatcagcaacttaaccacaaaacaaccatatattgatatctcacaaaacaaccataagttgatatttttgtgaatcgagtatttcagcaaaactactgcagtaagaa

SEQ ID NO: 3703 - DNA, 152 bp, synthetic construct
  source 1..152: mol_type = other DNA
aatgttgttgatgcaaggataaagtgatatttaataattatttataatcagcaacttaaccacaaaacaaccatatattgatatctcacaaaacaaccataagttgatatttttgtgaatcgagtatttcagcaaaactactgcagtaagaa

SEQ ID NO: 3704 - DNA, 152 bp, synthetic construct
  source 1..152: mol_type = other DNA
aatgttgttgatgcatgcataaagtgatatttaataattatttataatcagcaacttaaccacaaaacaaccatatattgatatctcacaaaacaaccataagttgatatttttgtgaatcgagtatttcagcaaaactactgcagtaagaa

SEQ ID NO: 3705 - DNA, 152 bp, synthetic construct
  source 1..152: mol_type = other DNA
aatgttgttgatgcttccataaagtgatatttaataattatttataatcagcaacttaaccacaaaacaaccatatattgatatctcacaaaacaaccataagttgatatttttgtgaatcgagtatttcagcaaaactactgcagtaagaa

SEQ ID NO: 3706 - DNA, 152 bp, synthetic construct
  source 1..152: mol_type = other DNA
aatgttgttgatggtaccataaagtgatatttaataattatttataatcagcaacttaaccacaaaacaaccatatattgatatctcacaaaacaaccataagttgatatttttgtgaatcgagtatttcagcaaaactactgcagtaagaa

SEQ ID NO: 3707 - DNA, 152 bp, synthetic construct
  source 1..152: mol_type = other DNA
aatgttgttgatcgaaccataaagtgatatttaataattatttataatcagcaacttaaccacaaaacaaccatatattgatatctcacaaaacaaccataagttgatatttttgtgaatcgagtatttcagcaaaactactgcagtaagaa

SEQ ID NO: 3708 - DNA, 152 bp, synthetic construct
  source 1..152: mol_type = other DNA
aatgttgttgaaccaaccataaagtgatatttaataattatttataatcagcaacttaaccacaaaacaaccatatattgatatctcacaaaacaaccataagttgatatttttgtgaatcgagtatttcagcaaaactactgcagtaagaa

SEQ ID NO: 3709 - DNA, 152 bp, synthetic construct
  source 1..152: mol_type = other DNA
aatgttgttgtagcaaccataaagtgatatttaataattatttataatcagcaacttaaccacaaaacaaccatatattgatatctcacaaaacaaccataagttgatatttttgtgaatcgagtatttcagcaaaactactgcagtaagaa

SEQ ID NO: 3710 - DNA, 152 bp, synthetic construct
  source 1..152: mol_type = other DNA
aatgttgttcttgcaaccataaagtgatatttaataattatttataatcagcaacttaaccacaaaacaaccatatattgatatctcacaaaacaaccataagttgatatttttgtgaatcgagtatttcagcaaaactactgcagtaagaa

SEQ ID NO: 3711 - DNA, 152 bp, synthetic construct
  source 1..152: mol_type = other DNA
aatgttgtacatgcaaccataaagtgatatttaataattatttataatcagcaacttaaccacaaaacaaccatatattgatatctcacaaaacaaccataagttgatatttttgtgaatcgagtatttcagcaaaactactgcagtaagaa

SEQ ID NO: 3712 - DNA, 152 bp, synthetic construct
  source 1..152: mol_type = other DNA
aatgttgaagatgcaaccataaagtgatatttaataattatttataatcagcaacttaaccacaaaacaaccatatattgatatctcacaaaacaaccataagttgatatttttgtgaatcgagtatttcagcaaaactactgcagtaagaa

SEQ ID NO: 3713 - DNA, 152 bp, synthetic construct
  source 1..152: mol_type = other DNA
aatgttcatgatgcaaccataaagtgatatttaataattatttataatcagcaacttaaccacaaaacaaccatatattgatatctcacaaaacaaccataagttgatatttttgtgaatcgagtatttcagcaaaactactgcagtaagaa

SEQ ID NO: 3714 - DNA, 152 bp, synthetic construct
  source 1..152: mol_type = other DNA
aatgtacttgatgcaaccataaagtgatatttaataattatttataatcagcaacttaaccacaaaacaaccatatattgatatctcacaaaacaaccataagttgatatttttgtgaatcgagtatttcagcaaaactactgcagtaagaa

SEQ ID NO: 3715 - DNA, 152 bp, synthetic construct
  source 1..152: mol_type = other DNA
aatgaagttgatgcaaccataaagtgatatttaataattatttataatcagcaacttaaccacaaaacaaccatatattgatatctcacaaaacaaccataagttgatatttttgtgaatcgagtatttcagcaaaactactgcagtaagaa

SEQ ID NO: 3716 - DNA, 152 bp, synthetic construct
  source 1..152: mol_type = other DNA
aatcatgttgatgcaaccataaagtgatatttaataattatttataatcagcaacttaaccacaaaacaaccatatattgatatctcacaaaacaaccataagttgatatttttgtgaatcgagtatttcagcaaaactactgcagtaagaa

SEQ ID NO: 3717 - DNA, 152 bp, synthetic construct
  source 1..152: mol_type = other DNA
aaacttgttgatgcaaccataaagtgatatttaataattatttataatcagcaacttaaccacaaaacaaccatatattgatatctcacaaaacaaccataagttgatatttttgtgaatcgagtatttcagcaaaactactgcagtaagaa

SEQ ID NO: 3718 - DNA, 152 bp, synthetic construct
  source 1..152: mol_type = other DNA
atagttgttgatgcaaccataaagtgatatttaataattatttataatcagcaacttaaccacaaaacaaccatatattgatatctcacaaaacaaccataagttgatatttttgtgaatcgagtatttcagcaaaactactgcagtaagaa

SEQ ID NO: 3719 - DNA, 152 bp, synthetic construct
  source 1..152: mol_type = other DNA
tttgttgttgatgcaaccataaagtgatatttaataattatttataatcagcaacttaaccacaaaacaaccatatattgatatctcacaaaacaaccataagttgatatttttgtgaatcgagtatttcagcaaaactactgcagtaagaa

SEQ ID NO: 3720 - DNA, 152 bp, synthetic construct
  source 1..152: mol_type = other DNA
ttacatgttgatgcaaccataaagtgatatttaataattatttataatcagcaacttaaccacaaaacaaccatatattgatatctcacaaaacaaccataagttgatatttttgtgaatcgagtatttcagcaaaactactgcagtaagaa

SEQ ID NO: 3721 - DNA, 152 bp, synthetic construct
  source 1..152: mol_type = other DNA
cgccgtgttgatgcaaccataaagtgatatttaataattatttataatcagcaacttaaccacaaaacaaccatatattgatatctcacaaaacaaccataagttgatatttttgtgaatcgagtatttcagcaaaactactgcagtaagaa

SEQ ID NO: 3722 - DNA, 152 bp, synthetic construct
  source 1..152: mol_type = other DNA
ttatatgttgatgcaaccataaagtgatatttaataattatttataatcagcaacttaaccacaaaacaaccatatattgatatctcacaaaacaaccataagttgatatttttgtgaatcgagtatttcagcaaaactactgcagtaagaa

SEQ ID NO: 3723 - DNA, 152 bp, synthetic construct
  source 1..152: mol_type = other DNA
ttacttgttgatgcaaccataaagtgatatttaataattatttataatcagcaacttaaccacaaaacaaccatatattgatatctcacaaaacaaccataagttgatatttttgtgaatcgagtatttcagcaaaactactgcagtaagaa

SEQ ID NO: 3724 - DNA, 152 bp, synthetic construct
  source 1..152: mol_type = other DNA
atacatgttgatgcaaccataaagtgatatttaataattatttataatcagcaacttaaccacaaaacaaccatatattgatatctcacaaaacaaccataagttgatatttttgtgaatcgagtatttcagcaaaactactgcagtaagaa

SEQ ID NO: 3725 - DNA, 152 bp, synthetic construct
  source 1..152: mol_type = other DNA
aaacaagttgatgcaaccataaagtgatatttaataattatttataatcagcaacttaaccacaaaacaaccatatattgatatctcacaaaacaaccataagttgatatttttgtgaatcgagtatttcagcaaaactactgcagtaagaa

SEQ ID NO: 3726 - DNA, 152 bp, synthetic construct
  source 1..152: mol_type = other DNA
aatcaacttgatgcaaccataaagtgatatttaataattatttataatcagcaacttaaccacaaaacaaccatatattgatatctcacaaaacaaccataagttgatatttttgtgaatcgagtatttcagcaaaactactgcagtaagaa

SEQ ID NO: 3727 - DNA, 152 bp, synthetic construct
  source 1..152: mol_type = other DNA
aatgaacatgatgcaaccataaagtgatatttaataattatttataatcagcaacttaaccacaaaacaaccatatattgatatctcacaaaacaaccataagttgatatttttgtgaatcgagtatttcagcaaaactactgcagtaagaa

SEQ ID NO: 3728 - DNA, 152 bp, synthetic construct
  source 1..152: mol_type = other DNA
aatgtacaagatgcaaccataaagtgatatttaataattatttataatcagcaacttaaccacaaaacaaccatatattgatatctcacaaaacaaccataagttgatatttttgtgaatcgagtatttcagcaaaactactgcagtaagaa

SEQ ID NO: 3729 - DNA, 152 bp, synthetic construct
  source 1..152: mol_type = other DNA
aatgttcaacatgcaaccataaagtgatatttaataattatttataatcagcaacttaaccacaaaacaaccatatattgatatctcacaaaacaaccataagttgatatttttgtgaatcgagtatttcagcaaaactactgcagtaagaa

SEQ ID NO: 3730 - DNA, 152 bp, synthetic construct
  source 1..152: mol_type = other DNA
aatgttgaacttgcaaccataaagtgatatttaataattatttataatcagcaacttaaccacaaaacaaccatatattgatatctcacaaaacaaccataagttgatatttttgtgaatcgagtatttcagcaaaactactgcagtaagaa

SEQ ID NO: 3731 - DNA, 152 bp, synthetic construct
  source 1..152: mol_type = other DNA
aatgttgtactagcaaccataaagtgatatttaataattatttataatcagcaacttaaccacaaaacaaccatatattgatatctcacaaaacaaccataagttgatatttttgtgaatcgagtatttcagcaaaactactgcagtaagaa

SEQ ID NO: 3732 - DNA, 152 bp, synthetic construct
  source 1..152: mol_type = other DNA
aatgttgttctaccaaccataaagtgatatttaataattatttataatcagcaacttaaccacaaaacaaccatatattgatatctcacaaaacaaccataagttgatatttttgtgaatcgagtatttcagcaaaactactgcagtaagaa

SEQ ID NO: 3733 - DNA, 152 bp, synthetic construct
  source 1..152: mol_type = other DNA
aatgttgttgtacgaaccataaagtgatatttaataattatttataatcagcaacttaaccacaaaacaaccatatattgatatctcacaaaacaaccataagttgatatttttgtgaatcgagtatttcagcaaaactactgcagtaagaa

SEQ ID NO: 3734 - DNA, 152 bp, synthetic construct
  source 1..152: mol_type = other DNA
aatgttgttgaacgtaccataaagtgatatttaataattatttataatcagcaacttaaccacaaaacaaccatatattgatatctcacaaaacaaccataagttgatatttttgtgaatcgagtatttcagcaaaactactgcagtaagaa

SEQ ID NO: 3735 - DNA, 152 bp, synthetic construct
  source 1..152: mol_type = other DNA
aatgttgttgatcgttccataaagtgatatttaataattatttataatcagcaacttaaccacaaaacaaccatatattgatatctcacaaaacaaccataagttgatatttttgtgaatcgagtatttcagcaaaactactgcagtaagaa

SEQ ID NO: 3736 - DNA, 152 bp, synthetic construct
  source 1..152: mol_type = other DNA
aatgttgttgatggttgcataaagtgatatttaataattatttataatcagcaacttaaccacaaaacaaccatatattgatatctcacaaaacaaccataagttgatatttttgtgaatcgagtatttcagcaaaactactgcagtaagaa

SEQ ID NO: 3737 - DNA, 152 bp, synthetic construct
  source 1..152: mol_type = other DNA
aatgttgttgatgcttggataaagtgatatttaataattatttataatcagcaacttaaccacaaaacaaccatatattgatatctcacaaaacaaccataagttgatatttttgtgaatcgagtatttcagcaaaactactgcagtaagaa

SEQ ID NO: 3738 - DNA, 152 bp, synthetic construct
  source 1..152: mol_type = other DNA
aatgttgttgatgcatggttaaagtgatatttaataattatttataatcagcaacttaaccacaaaacaaccatatattgatatctcacaaaacaaccataagttgatatttttgtgaatcgagtatttcagcaaaactactgcagtaagaa

SEQ ID NO: 3739 - DNA, 152 bp, synthetic construct
  source 1..152: mol_type = other DNA
aatgttgttgatgcaaggtaaaagtgatatttaataattatttataatcagcaacttaaccacaaaacaaccatatattgatatctcacaaaacaaccataagttgatatttttgtgaatcgagtatttcagcaaaactactgcagtaagaa

SEQ ID NO: 3740 - DNA, 152 bp, synthetic construct
  source 1..152: mol_type = other DNA
aatgttgttgatgcaacgtataagtgatatttaataattatttataatcagcaacttaaccacaaaacaaccatatattgatatctcacaaaacaaccataagttgatatttttgtgaatcgagtatttcagcaaaactactgcagtaagaa

SEQ ID NO: 3741 - DNA, 152 bp, synthetic construct
  source 1..152: mol_type = other DNA
aatgttgttgatgcaacctattagtgatatttaataattatttataatcagcaacttaaccacaaaacaaccatatattgatatctcacaaaacaaccataagttgatatttttgtgaatcgagtatttcagcaaaactactgcagtaagaa

SEQ ID NO: 3742 - DNA, 152 bp, synthetic construct
  source 1..152: mol_type = other DNA
aatgttgttgatgcaaccaatttgtgatatttaataattatttataatcagcaacttaaccacaaaacaaccatatattgatatctcacaaaacaaccataagttgatatttttgtgaatcgagtatttcagcaaaactactgcagtaagaa

SEQ ID NO: 3743 - DNA, 152 bp, synthetic construct
  source 1..152: mol_type = other DNA
aatgttgttgatgcaaccattttctgatatttaataattatttataatcagcaacttaaccacaaaacaaccatatattgatatctcacaaaacaaccataagttgatatttttgtgaatcgagtatttcagcaaaactactgcagtaagaa

SEQ ID NO: 3744 - DNA, 152 bp, synthetic construct
  source 1..152: mol_type = other DNA
aatgttgttgatgcaaccatattcagatatttaataattatttataatcagcaacttaaccacaaaacaaccatatattgatatctcacaaaacaaccataagttgatatttttgtgaatcgagtatttcagcaaaactactgcagtaagaa

SEQ ID NO: 3745 - DNA, 152 bp, synthetic construct
  source 1..152: mol_type = other DNA
aatgttgttgatgcaaccataatcacatatttaataattatttataatcagcaacttaaccacaaaacaaccatatattgatatctcacaaaacaaccataagttgatatttttgtgaatcgagtatttcagcaaaactactgcagtaagaa

SEQ ID NO: 3746 - DNA, 152 bp, synthetic construct
  source 1..152: mol_type = other DNA
aatgttgttgatgcaaccataaacacttatttaataattatttataatcagcaacttaaccacaaaacaaccatatattgatatctcacaaaacaaccataagttgatatttttgtgaatcgagtatttcagcaaaactactgcagtaagaa

SEQ ID NO: 3747 - DNA, 152 bp, synthetic construct
  source 1..152: mol_type = other DNA
aatgttgttgatgcaaccataaagactaatttaataattatttataatcagcaacttaaccacaaaacaaccatatattgatatctcacaaaacaaccataagttgatatttttgtgaatcgagtatttcagcaaaactactgcagtaagaa

SEQ ID NO: 3748 - DNA, 152 bp, synthetic construct
  source 1..152: mol_type = other DNA
aatgttgttgatgcaaccataaagtctattttaataattatttataatcagcaacttaaccacaaaacaaccatatattgatatctcacaaaacaaccataagttgatatttttgtgaatcgagtatttcagcaaaactactgcagtaagaa

SEQ ID NO: 3749 - DNA, 152 bp, synthetic construct
  source 1..152: mol_type = other DNA
aatgttgttgatgcaaccataaagtgtatattaataattatttataatcagcaacttaaccacaaaacaaccatatattgatatctcacaaaacaaccataagttgatatttttgtgaatcgagtatttcagcaaaactactgcagtaagaa

SEQ ID NO: 3750 - DNA, 152 bp, synthetic construct
  source 1..152: mol_type = other DNA
aatgttgttgatgcaaccataaagtgaataataataattatttataatcagcaacttaaccacaaaacaaccatatattgatatctcacaaaacaaccataagttgatatttttgtgaatcgagtatttcagcaaaactactgcagtaagaa

SEQ ID NO: 3751 - DNA, 152 bp, synthetic construct
  source 1..152: mol_type = other DNA
aatgttgttgatgcaaccataaagtgattaaaaataattatttataatcagcaacttaaccacaaaacaaccatatattgatatctcacaaaacaaccataagttgatatttttgtgaatcgagtatttcagcaaaactactgcagtaagaa

SEQ ID NO: 3752 - DNA, 152 bp, synthetic construct
  source 1..152: mol_type = other DNA
aatgttgttgatgcaaccataaagtgataaaatataattatttataatcagcaacttaaccacaaaacaaccatatattgatatctcacaaaacaaccataagttgatatttttgtgaatcgagtatttcagcaaaactactgcagtaagaa

SEQ ID NO: 3753 - DNA, 152 bp, synthetic construct
  source 1..152: mol_type = other DNA
aatgttgttgatgcaaccataaagtgatataatttaattatttataatcagcaacttaaccacaaaacaaccatatattgatatctcacaaaacaaccataagttgatatttttgtgaatcgagtatttcagcaaaactactgcagtaagaa

SEQ ID NO: 3754 - DNA, 152 bp, synthetic construct
  source 1..152: mol_type = other DNA
aatgttgttgatgcaaccataaagtgatattattaaattatttataatcagcaacttaaccacaaaacaaccatatattgatatctcacaaaacaaccataagttgatatttttgtgaatcgagtatttcagcaaaactactgcagtaagaa

SEQ ID NO: 3755 - DNA, 152 bp, synthetic construct
  source 1..152: mol_type = other DNA
aatgttgttgatgcaaccataaagtgatatttttatattatttataatcagcaacttaaccacaaaacaaccatatattgatatctcacaaaacaaccataagttgatatttttgtgaatcgagtatttcagcaaaactactgcagtaagaa

SEQ ID NO: 3756 - DNA, 152 bp, synthetic construct
  source 1..152: mol_type = other DNA
aatgttgttgatgcaaccataaagtgatatttatattttatttataatcagcaacttaaccacaaaacaaccatatattgatatctcacaaaacaaccataagttgatatttttgtgaatcgagtatttcagcaaaactactgcagtaagaa

SEQ ID NO: 3757 - DNA, 152 bp, synthetic construct
  source 1..152: mol_type = other DNA
aatgttgttgatgcaaccataaagtgatatttaaattatatttataatcagcaacttaaccacaaaacaaccatatattgatatctcacaaaacaaccataagttgatatttttgtgaatcgagtatttcagcaaaactactgcagtaagaa

SEQ ID NO: 3758 - DNA, 152 bp, synthetic construct
  source 1..152: mol_type = other DNA
aatgttgttgatgcaaccataaagtgatatttaatttaaatttataatcagcaacttaaccacaaaacaaccatatattgatatctcacaaaacaaccataagttgatatttttgtgaatcgagtatttcagcaaaactactgcagtaagaa

SEQ ID NO: 3759 - DNA, 152 bp, synthetic construct
  source 1..152: mol_type = other DNA
aatgttgttgatgcaaccataaagtgatatttaatataattttataatcagcaacttaaccacaaaacaaccatatattgatatctcacaaaacaaccataagttgatatttttgtgaatcgagtatttcagcaaaactactgcagtaagaa

SEQ ID NO: 3760 - DNA, 152 bp, synthetic construct
  source 1..152: mol_type = other DNA
aatgttgttgatgcaaccataaagtgatatttaataaaatattataatcagcaacttaaccacaaaacaaccatatattgatatctcacaaaacaaccataagttgatatttttgtgaatcgagtatttcagcaaaactactgcagtaagaa

SEQ ID NO: 3761 - DNA, 152 bp, synthetic construct
  source 1..152: mol_type = other DNA
aatgttgttgatgcaaccataaagtgatatttaataatataatataatcagcaacttaaccacaaaacaaccatatattgatatctcacaaaacaaccataagttgatatttttgtgaatcgagtatttcagcaaaactactgcagtaagaa

SEQ ID NO: 3762 - DNA, 152 bp, synthetic construct
  source 1..152: mol_type = other DNA
aatgttgttgatgcaaccataaagtgatatttaataatttaaaataatcagcaacttaaccacaaaacaaccatatattgatatctcacaaaacaaccataagttgatatttttgtgaatcgagtatttcagcaaaactactgcagtaagaa

SEQ ID NO: 3763 - DNA, 152 bp, synthetic construct
  source 1..152: mol_type = other DNA
aatgttgttgatgcaaccataaagtgatatttaataattaaaattaatcagcaacttaaccacaaaacaaccatatattgatatctcacaaaacaaccataagttgatatttttgtgaatcgagtatttcagcaaaactactgcagtaagaa

SEQ ID NO: 3764 - DNA, 152 bp, synthetic construct
  source 1..152: mol_type = other DNA
aatgttgttgatgcaaccataaagtgatatttaataattataataaatcagcaacttaaccacaaaacaaccatatattgatatctcacaaaacaaccataagttgatatttttgtgaatcgagtatttcagcaaaactactgcagtaagaa

SEQ ID NO: 3765 - DNA, 152 bp, synthetic construct
  source 1..152: mol_type = other DNA
aatgttgttgatgcaaccataaagtgatatttaataattattatatatcagcaacttaaccacaaaacaaccatatattgatatctcacaaaacaaccataagttgatatttttgtgaatcgagtatttcagcaaaactactgcagtaagaa

SEQ ID NO: 3766 - DNA, 152 bp, synthetic construct
  source 1..152: mol_type = other DNA
aatgttgttgatgcaaccataaagtgatatttaataattattttatttcagcaacttaaccacaaaacaaccatatattgatatctcacaaaacaaccataagttgatatttttgtgaatcgagtatttcagcaaaactactgcagtaagaa

SEQ ID NO: 3767 - DNA, 152 bp, synthetic construct
  source 1..152: mol_type = other DNA
aatgttgttgatgcaaccataaagtgatatttaataattatttaattacagcaacttaaccacaaaacaaccatatattgatatctcacaaaacaaccataagttgatatttttgtgaatcgagtatttcagcaaaactactgcagtaagaa

SEQ ID NO: 3768 - DNA, 152 bp, synthetic construct
  source 1..152: mol_type = other DNA
aatgttgttgatgcaaccataaagtgatatttaataattatttatttagagcaacttaaccacaaaacaaccatatattgatatctcacaaaacaaccataagttgatatttttgtgaatcgagtatttcagcaaaactactgcagtaagaa

SEQ ID NO: 3769 - DNA, 152 bp, synthetic construct
  source 1..152: mol_type = other DNA
aatgttgttgatgcaaccataaagtgatatttaataattatttatatagtgcaacttaaccacaaaacaaccatatattgatatctcacaaaacaaccataagttgatatttttgtgaatcgagtatttcagcaaaactactgcagtaagaa

SEQ ID NO: 3770 - DNA, 152 bp, synthetic construct
  source 1..152: mol_type = other DNA
aatgttgttgatgcaaccataaagtgatatttaataattatttataaagtccaacttaaccacaaaacaaccatatattgatatctcacaaaacaaccataagttgatatttttgtgaatcgagtatttcagcaaaactactgcagtaagaa

SEQ ID NO: 3771 - DNA, 152 bp, synthetic construct
  source 1..152: mol_type = other DNA
aatgttgttgatgcaaccataaagtgatatttaataattatttataatgtcgaacttaaccacaaaacaaccatatattgatatctcacaaaacaaccataagttgatatttttgtgaatcgagtatttcagcaaaactactgcagtaagaa

SEQ ID NO: 3772 - DNA, 152 bp, synthetic construct
  source 1..152: mol_type = other DNA
aatgttgttgatgcaaccataaagtgatatttaataattatttataatctcgtacttaaccacaaaacaaccatatattgatatctcacaaaacaaccataagttgatatttttgtgaatcgagtatttcagcaaaactactgcagtaagaa

SEQ ID NO: 3773 - DNA, 152 bp, synthetic construct
  source 1..152: mol_type = other DNA
aatgttgttgatgcaaccataaagtgatatttaataattatttataatcacgttcttaaccacaaaacaaccatatattgatatctcacaaaacaaccataagttgatatttttgtgaatcgagtatttcagcaaaactactgcagtaagaa

SEQ ID NO: 3774 - DNA, 152 bp, synthetic construct
  source 1..152: mol_type = other DNA
aatgttgttgatgcaaccataaagtgatatttaataattatttataatcaggttgttaaccacaaaacaaccatatattgatatctcacaaaacaaccataagttgatatttttgtgaatcgagtatttcagcaaaactactgcagtaagaa

SEQ ID NO: 3775 - DNA, 152 bp, synthetic construct
  source 1..152: mol_type = other DNA
aatgttgttgatgcaaccataaagtgatatttaataattatttataatcagcttgataaccacaaaacaaccatatattgatatctcacaaaacaaccataagttgatatttttgtgaatcgagtatttcagcaaaactactgcagtaagaa

SEQ ID NO: 3776 - DNA, 152 bp, synthetic construct
  source 1..152: mol_type = other DNA
aatgttgttgatgcaaccataaagtgatatttaataattatttataatcagcatgaaaaccacaaaacaaccatatattgatatctcacaaaacaaccataagttgatatttttgtgaatcgagtatttcagcaaaactactgcagtaagaa

SEQ ID NO: 3777 - DNA, 152 bp, synthetic construct
  source 1..152: mol_type = other DNA
aatgttgttgatgcaaccataaagtgatatttaataattatttataatcagcaagaataccacaaaacaaccatatattgatatctcacaaaacaaccataagttgatatttttgtgaatcgagtatttcagcaaaactactgcagtaagaa

SEQ ID NO: 3778 - DNA, 152 bp, synthetic construct
  source 1..152: mol_type = other DNA
aatgttgttgatgcaaccataaagtgatatttaataattatttataatcagcaacaattccacaaaacaaccatatattgatatctcacaaaacaaccataagttgatatttttgtgaatcgagtatttcagcaaaactactgcagtaagaa

SEQ ID NO: 3779 - DNA, 152 bp, synthetic construct
  source 1..152: mol_type = other DNA
aatgttgttgatgcaaccataaagtgatatttaataattatttataatcagcaactattgcacaaaacaaccatatattgatatctcacaaaacaaccataagttgatatttttgtgaatcgagtatttcagcaaaactactgcagtaagaa

SEQ ID NO: 3780 - DNA, 152 bp, synthetic construct
  source 1..152: mol_type = other DNA
aatgttgttgatgcaaccataaagtgatatttaataattatttataatcagcaacttttggacaaaacaaccatatattgatatctcacaaaacaaccataagttgatatttttgtgaatcgagtatttcagcaaaactactgcagtaagaa

SEQ ID NO: 3781 - DNA, 152 bp, synthetic construct
  source 1..152: mol_type = other DNA
aatgttgttgatgcaaccataaagtgatatttaataattatttataatcagcaacttatggtcaaaacaaccatatattgatatctcacaaaacaaccataagttgatatttttgtgaatcgagtatttcagcaaaactactgcagtaagaa

SEQ ID NO: 3782 - DNA, 152 bp, synthetic construct
  source 1..152: mol_type = other DNA
aatgttgttgatgcaaccataaagtgatatttaataattatttataatcagcaacttaaggtgaaaacaaccatatattgatatctcacaaaacaaccataagttgatatttttgtgaatcgagtatttcagcaaaactactgcagtaagaa

SEQ ID NO: 3783 - DNA, 152 bp, synthetic construct
  source 1..152: mol_type = other DNA
aatgttgttgatgcaaccataaagtgatatttaataattatttataatcagcaacttaacgtgtaaacaaccatatattgatatctcacaaaacaaccataagttgatatttttgtgaatcgagtatttcagcaaaactactgcagtaagaa

SEQ ID NO: 3784 - DNA, 152 bp, synthetic construct
  source 1..152: mol_type = other DNA
aatgttgttgatgcaaccataaagtgatatttaataattatttataatcagcaacttaacctgttaacaaccatatattgatatctcacaaaacaaccataagttgatatttttgtgaatcgagtatttcagcaaaactactgcagtaagaa

SEQ ID NO: 3785 - DNA, 152 bp, synthetic construct
  source 1..152: mol_type = other DNA
aatgttgttgatgcaaccataaagtgatatttaataattatttataatcagcaacttaaccagtttacaaccatatattgatatctcacaaaacaaccataagttgatatttttgtgaatcgagtatttcagcaaaactactgcagtaagaa

SEQ ID NO: 3786 - DNA, 152 bp, synthetic construct
  source 1..152: mol_type = other DNA
aatgttgttgatgcaaccataaagtgatatttaataattatttataatcagcaacttaaccacttttcaaccatatattgatatctcacaaaacaaccataagttgatatttttgtgaatcgagtatttcagcaaaactactgcagtaagaa

SEQ ID NO: 3787 - DNA, 152 bp, synthetic construct
  source 1..152: mol_type = other DNA
aatgttgttgatgcaaccataaagtgatatttaataattatttataatcagcaacttaaccacatttgaaccatatattgatatctcacaaaacaaccataagttgatatttttgtgaatcgagtatttcagcaaaactactgcagtaagaa

SEQ ID NO: 3788 - DNA, 152 bp, synthetic construct
  source 1..152: mol_type = other DNA
aatgttgttgatgcaaccataaagtgatatttaataattatttataatcagcaacttaaccacaattgtaccatatattgatatctcacaaaacaaccataagttgatatttttgtgaatcgagtatttcagcaaaactactgcagtaagaa

SEQ ID NO: 3789 - DNA, 152 bp, synthetic construct
  source 1..152: mol_type = other DNA
aatgttgttgatgcaaccataaagtgatatttaataattatttataatcagcaacttaaccacaaatgttccatatattgatatctcacaaaacaaccataagttgatatttttgtgaatcgagtatttcagcaaaactactgcagtaagaa

SEQ ID NO: 3790 - DNA, 152 bp, synthetic construct
  source 1..152: mol_type = other DNA
aatgttgttgatgcaaccataaagtgatatttaataattatttataatcagcaacttaaccacaaaagttgcatatattgatatctcacaaaacaaccataagttgatatttttgtgaatcgagtatttcagcaaaactactgcagtaagaa

SEQ ID NO: 3791 - DNA, 152 bp, synthetic construct
  source 1..152: mol_type = other DNA
aatgttgttgatgcaaccataaagtgatatttaataattatttataatcagcaacttaaccacaaaacttggatatattgatatctcacaaaacaaccataagttgatatttttgtgaatcgagtatttcagcaaaactactgcagtaagaa

SEQ ID NO: 3792 - DNA, 152 bp, synthetic construct
  source 1..152: mol_type = other DNA
aatgttgttgatgcaaccataaagtgatatttaataattatttataatcagcaacttaaccacaaaacatggttatattgatatctcacaaaacaaccataagttgatatttttgtgaatcgagtatttcagcaaaactactgcagtaagaa

SEQ ID NO: 3793 - DNA, 152 bp, synthetic construct
  source 1..152: mol_type = other DNA
aatgttgttgatgcaaccataaagtgatatttaataattatttataatcagcaacttaaccacaaaacaaggtaatattgatatctcacaaaacaaccataagttgatatttttgtgaatcgagtatttcagcaaaactactgcagtaagaa

SEQ ID NO: 3794 - DNA, 152 bp, synthetic construct
  source 1..152: mol_type = other DNA
aatgttgttgatgcaaccataaagtgatatttaataattatttataatcagcaacttaaccacaaaacaacgtattattgatatctcacaaaacaaccataagttgatatttttgtgaatcgagtatttcagcaaaactactgcagtaagaa

SEQ ID NO: 3795 - DNA, 152 bp, synthetic construct
  source 1..152: mol_type = other DNA
aatgttgttgatgcaaccataaagtgatatttaataattatttataatcagcaacttaaccacaaaacaacctataattgatatctcacaaaacaaccataagttgatatttttgtgaatcgagtatttcagcaaaactactgcagtaagaa

SEQ ID NO: 3796 - DNA, 152 bp, synthetic construct
  source 1..152: mol_type = other DNA
aatgttgttgatgcaaccataaagtgatatttaataattatttataatcagcaacttaaccacaaaacaaccaatatttgatatctcacaaaacaaccataagttgatatttttgtgaatcgagtatttcagcaaaactactgcagtaagaa

SEQ ID NO: 3797 - DNA, 152 bp, synthetic construct
  source 1..152: mol_type = other DNA
aatgttgttgatgcaaccataaagtgatatttaataattatttataatcagcaacttaaccacaaaacaaccattatatgatatctcacaaaacaaccataagttgatatttttgtgaatcgagtatttcagcaaaactactgcagtaagaa

SEQ ID NO: 3798 - DNA, 152 bp, synthetic construct
  source 1..152: mol_type = other DNA
aatgttgttgatgcaaccataaagtgatatttaataattatttataatcagcaacttaaccacaaaacaaccataataagatatctcacaaaacaaccataagttgatatttttgtgaatcgagtatttcagcaaaactactgcagtaagaa

SEQ ID NO: 3799 - DNA, 152 bp, synthetic construct
  source 1..152: mol_type = other DNA
aatgttgttgatgcaaccataaagtgatatttaataattatttataatcagcaacttaaccacaaaacaaccatattaacatatctcacaaaacaaccataagttgatatttttgtgaatcgagtatttcagcaaaactactgcagtaagaa

SEQ ID NO: 3800 - DNA, 152 bp, synthetic construct
  source 1..152: mol_type = other DNA
aatgttgttgatgcaaccataaagtgatatttaataattatttataatcagcaacttaaccacaaaacaaccatataaacttatctcacaaaacaaccataagttgatatttttgtgaatcgagtatttcagcaaaactactgcagtaagaa

SEQ ID NO: 3801 - DNA, 152 bp, synthetic construct
  source 1..152: mol_type = other DNA
aatgttgttgatgcaaccataaagtgatatttaataattatttataatcagcaacttaaccacaaaacaaccatatatactaatctcacaaaacaaccataagttgatatttttgtgaatcgagtatttcagcaaaactactgcagtaagaa

SEQ ID NO: 3802 - DNA, 152 bp, synthetic construct
  source 1..152: mol_type = other DNA
aatgttgttgatgcaaccataaagtgatatttaataattatttataatcagcaacttaaccacaaaacaaccatatattctattctcacaaaacaaccataagttgatatttttgtgaatcgagtatttcagcaaaactactgcagtaagaa

SEQ ID NO: 3803 - DNA, 152 bp, synthetic construct
  source 1..152: mol_type = other DNA
aatgttgttgatgcaaccataaagtgatatttaataattatttataatcagcaacttaaccacaaaacaaccatatattgtatactcacaaaacaaccataagttgatatttttgtgaatcgagtatttcagcaaaactactgcagtaagaa

SEQ ID NO: 3804 - DNA, 152 bp, synthetic construct
  source 1..152: mol_type = other DNA
aatgttgttgatgcaaccataaagtgatatttaataattatttataatcagcaacttaaccacaaaacaaccatatattgaatagtcacaaaacaaccataagttgatatttttgtgaatcgagtatttcagcaaaactactgcagtaagaa

SEQ ID NO: 3805 - DNA, 152 bp, synthetic construct
  source 1..152: mol_type = other DNA
aatgttgttgatgcaaccataaagtgatatttaataattatttataatcagcaacttaaccacaaaacaaccatatattgattagacacaaaacaaccataagttgatatttttgtgaatcgagtatttcagcaaaactactgcagtaagaa

SEQ ID NO: 3806 - DNA, 152 bp, synthetic construct
  source 1..152: mol_type = other DNA
aatgttgttgatgcaaccataaagtgatatttaataattatttataatcagcaacttaaccacaaaacaaccatatattgataagagacaaaacaaccataagttgatatttttgtgaatcgagtatttcagcaaaactactgcagtaagaa

SEQ ID NO: 3807 - DNA, 152 bp, synthetic construct
  source 1..152: mol_type = other DNA
aatgttgttgatgcaaccataaagtgatatttaataattatttataatcagcaacttaaccacaaaacaaccatatattgatatgagtcaaaacaaccataagttgatatttttgtgaatcgagtatttcagcaaaactactgcagtaagaa

SEQ ID NO: 3808 - DNA, 152 bp, synthetic construct
  source 1..152: mol_type = other DNA
aatgttgttgatgcaaccataaagtgatatttaataattatttataatcagcaacttaaccacaaaacaaccatatattgatatcagtgaaaacaaccataagttgatatttttgtgaatcgagtatttcagcaaaactactgcagtaagaa

SEQ ID NO: 3809 - DNA, 152 bp, synthetic construct
  source 1..152: mol_type = other DNA
aatgttgttgatgcaaccataaagtgatatttaataattatttataatcagcaacttaaccacaaaacaaccatatattgatatctgtgtaaacaaccataagttgatatttttgtgaatcgagtatttcagcaaaactactgcagtaagaa

SEQ ID NO: 3810 - DNA, 152 bp, synthetic construct
  source 1..152: mol_type = other DNA
aatgttgttgatgcaaccataaagtgatatttaataattatttataatcagcaacttaaccacaaaacaaccatatattgatatctctgttaacaaccataagttgatatttttgtgaatcgagtatttcagcaaaactactgcagtaagaa

SEQ ID NO: 3811 - DNA, 152 bp, synthetic construct
  source 1..152: mol_type = other DNA
aatgttgttgatgcaaccataaagtgatatttaataattatttataatcagcaacttaaccacaaaacaaccatatattgatatctcagtttacaaccataagttgatatttttgtgaatcgagtatttcagcaaaactactgcagtaagaa

SEQ ID NO: 3812 - DNA, 152 bp, synthetic construct
  source 1..152: mol_type = other DNA
aatgttgttgatgcaaccataaagtgatatttaataattatttataatcagcaacttaaccacaaaacaaccatatattgatatctcacttttcaaccataagttgatatttttgtgaatcgagtatttcagcaaaactactgcagtaagaa

SEQ ID NO: 3813 - DNA, 152 bp, synthetic construct
  source 1..152: mol_type = other DNA
aatgttgttgatgcaaccataaagtgatatttaataattatttataatcagcaacttaaccacaaaacaaccatatattgatatctcacatttgaaccataagttgatatttttgtgaatcgagtatttcagcaaaactactgcagtaagaa

SEQ ID NO: 3814 - DNA, 152 bp, synthetic construct
  source 1..152: mol_type = other DNA
aatgttgttgatgcaaccataaagtgatatttaataattatttataatcagcaacttaaccacaaaacaaccatatattgatatctcacaattgtaccataagttgatatttttgtgaatcgagtatttcagcaaaactactgcagtaagaa

SEQ ID NO: 3815 - DNA, 152 bp, synthetic construct
  source 1..152: mol_type = other DNA
aatgttgttgatgcaaccataaagtgatatttaataattatttataatcagcaacttaaccacaaaacaaccatatattgatatctcacaaatgttccataagttgatatttttgtgaatcgagtatttcagcaaaactactgcagtaagaa

SEQ ID NO: 3816 - DNA, 152 bp, synthetic construct
  source 1..152: mol_type = other DNA
aatgttgttgatgcaaccataaagtgatatttaataattatttataatcagcaacttaaccacaaaacaaccatatattgatatctcacaaaagttgcataagttgatatttttgtgaatcgagtatttcagcaaaactactgcagtaagaa

SEQ ID NO: 3817 - DNA, 152 bp, synthetic construct
  source 1..152: mol_type = other DNA
aatgttgttgatgcaaccataaagtgatatttaataattatttataatcagcaacttaaccacaaaacaaccatatattgatatctcacaaaacttggataagttgatatttttgtgaatcgagtatttcagcaaaactactgcagtaagaa

SEQ ID NO: 3818 - DNA, 152 bp, synthetic construct
  source 1..152: mol_type = other DNA
aatgttgttgatgcaaccataaagtgatatttaataattatttataatcagcaacttaaccacaaaacaaccatatattgatatctcacaaaacatggttaagttgatatttttgtgaatcgagtatttcagcaaaactactgcagtaagaa

SEQ ID NO: 3819 - DNA, 152 bp, synthetic construct
  source 1..152: mol_type = other DNA
aatgttgttgatgcaaccataaagtgatatttaataattatttataatcagcaacttaaccacaaaacaaccatatattgatatctcacaaaacaaggtaaagttgatatttttgtgaatcgagtatttcagcaaaactactgcagtaagaa

SEQ ID NO: 3820 - DNA, 152 bp, synthetic construct
  source 1..152: mol_type = other DNA
aatgttgttgatgcaaccataaagtgatatttaataattatttataatcagcaacttaaccacaaaacaaccatatattgatatctcacaaaacaacgtatagttgatatttttgtgaatcgagtatttcagcaaaactactgcagtaagaa

SEQ ID NO: 3821 - DNA, 152 bp, synthetic construct
  source 1..152: mol_type = other DNA
aatgttgttgatgcaaccataaagtgatatttaataattatttataatcagcaacttaaccacaaaacaaccatatattgatatctcacaaaacaacctattgttgatatttttgtgaatcgagtatttcagcaaaactactgcagtaagaa

SEQ ID NO: 3822 - DNA, 152 bp, synthetic construct
  source 1..152: mol_type = other DNA
aatgttgttgatgcaaccataaagtgatatttaataattatttataatcagcaacttaaccacaaaacaaccatatattgatatctcacaaaacaaccaattcttgatatttttgtgaatcgagtatttcagcaaaactactgcagtaagaa

SEQ ID NO: 3823 - DNA, 152 bp, synthetic construct
  source 1..152: mol_type = other DNA
aatgttgttgatgcaaccataaagtgatatttaataattatttataatcagcaacttaaccacaaaacaaccatatattgatatctcacaaaacaaccatttcatgatatttttgtgaatcgagtatttcagcaaaactactgcagtaagaa

SEQ ID NO: 3824 - DNA, 152 bp, synthetic construct
  source 1..152: mol_type = other DNA
aatgttgttgatgcaaccataaagtgatatttaataattatttataatcagcaacttaaccacaaaacaaccatatattgatatctcacaaaacaaccatatcaagatatttttgtgaatcgagtatttcagcaaaactactgcagtaagaa

SEQ ID NO: 3825 - DNA, 152 bp, synthetic construct
  source 1..152: mol_type = other DNA
aatgttgttgatgcaaccataaagtgatatttaataattatttataatcagcaacttaaccacaaaacaaccatatattgatatctcacaaaacaaccataacaacatatttttgtgaatcgagtatttcagcaaaactactgcagtaagaa

SEQ ID NO: 3826 - DNA, 152 bp, synthetic construct
  source 1..152: mol_type = other DNA
aatgttgttgatgcaaccataaagtgatatttaataattatttataatcagcaacttaaccacaaaacaaccatatattgatatctcacaaaacaaccataagaacttatttttgtgaatcgagtatttcagcaaaactactgcagtaagaa

SEQ ID NO: 3827 - DNA, 152 bp, synthetic construct
  source 1..152: mol_type = other DNA
aatgttgttgatgcaaccataaagtgatatttaataattatttataatcagcaacttaaccacaaaacaaccatatattgatatctcacaaaacaaccataagtactaatttttgtgaatcgagtatttcagcaaaactactgcagtaagaa

SEQ ID NO: 3828 - DNA, 152 bp, synthetic construct
  source 1..152: mol_type = other DNA
aatgttgttgatgcaaccataaagtgatatttaataattatttataatcagcaacttaaccacaaaacaaccatatattgatatctcacaaaacaaccataagttctattttttgtgaatcgagtatttcagcaaaactactgcagtaagaa

SEQ ID NO: 3829 - DNA, 152 bp, synthetic construct
  source 1..152: mol_type = other DNA
aatgttgttgatgcaaccataaagtgatatttaataattatttataatcagcaacttaaccacaaaacaaccatatattgatatctcacaaaacaaccataagttgtatattttgtgaatcgagtatttcagcaaaactactgcagtaagaa

SEQ ID NO: 3830 - DNA, 152 bp, synthetic construct
  source 1..152: mol_type = other DNA
aatgttgttgatgcaaccataaagtgatatttaataattatttataatcagcaacttaaccacaaaacaaccatatattgatatctcacaaaacaaccataagttgaataatttgtgaatcgagtatttcagcaaaactactgcagtaagaa

SEQ ID NO: 3831 - DNA, 152 bp, synthetic construct
  source 1..152: mol_type = other DNA
aatgttgttgatgcaaccataaagtgatatttaataattatttataatcagcaacttaaccacaaaacaaccatatattgatatctcacaaaacaaccataagttgattaaattgtgaatcgagtatttcagcaaaactactgcagtaagaa

SEQ ID NO: 3832 - DNA, 152 bp, synthetic construct
  source 1..152: mol_type = other DNA
aatgttgttgatgcaaccataaagtgatatttaataattatttataatcagcaacttaaccacaaaacaaccatatattgatatctcacaaaacaaccataagttgataaaaatgtgaatcgagtatttcagcaaaactactgcagtaagaa

SEQ ID NO: 3833 - DNA, 152 bp, synthetic construct
  source 1..152: mol_type = other DNA
aatgttgttgatgcaaccataaagtgatatttaataattatttataatcagcaacttaaccacaaaacaaccatatattgatatctcacaaaacaaccataagttgatataaaagtgaatcgagtatttcagcaaaactactgcagtaagaa

SEQ ID NO: 3834 - DNA, 152 bp, synthetic construct
  source 1..152: mol_type = other DNA
aatgttgttgatgcaaccataaagtgatatttaataattatttataatcagcaacttaaccacaaaacaaccatatattgatatctcacaaaacaaccataagttgatattaaactgaatcgagtatttcagcaaaactactgcagtaagaa

SEQ ID NO: 3835 - DNA, 152 bp, synthetic construct
  source 1..152: mol_type = other DNA
aatgttgttgatgcaaccataaagtgatatttaataattatttataatcagcaacttaaccacaaaacaaccatatattgatatctcacaaaacaaccataagttgatatttaacagaatcgagtatttcagcaaaactactgcagtaagaa

SEQ ID NO: 3836 - DNA, 152 bp, synthetic construct
  source 1..152: mol_type = other DNA
aatgttgttgatgcaaccataaagtgatatttaataattatttataatcagcaacttaaccacaaaacaaccatatattgatatctcacaaaacaaccataagttgatattttacacaatcgagtatttcagcaaaactactgcagtaagaa

SEQ ID NO: 3837 - DNA, 152 bp, synthetic construct
  source 1..152: mol_type = other DNA
aatgttgttgatgcaaccataaagtgatatttaataattatttataatcagcaacttaaccacaaaacaaccatatattgatatctcacaaaacaaccataagttgatatttttcactatcgagtatttcagcaaaactactgcagtaagaa

SEQ ID NO: 3838 - DNA, 152 bp, synthetic construct
  source 1..152: mol_type = other DNA
aatgttgttgatgcaaccataaagtgatatttaataattatttataatcagcaacttaaccacaaaacaaccatatattgatatctcacaaaacaaccataagttgatatttttgactttcgagtatttcagcaaaactactgcagtaagaa

SEQ ID NO: 3839 - DNA, 152 bp, synthetic construct
  source 1..152: mol_type = other DNA
aatgttgttgatgcaaccataaagtgatatttaataattatttataatcagcaacttaaccacaaaacaaccatatattgatatctcacaaaacaaccataagttgatatttttgtcttacgagtatttcagcaaaactactgcagtaagaa

SEQ ID NO: 3840 - DNA, 152 bp, synthetic construct
  source 1..152: mol_type = other DNA
ccgtttgttgatgcaaccataaagtgatatttaataattatttataatcagcaacttaaccacaaaacaaccatatattgatatctcacaaaacaaccataagttgatatttttgtgaatcgagtatttcagcaaaactactgcagtaagaa

SEQ ID NO: 3841 - DNA, 152 bp, synthetic construct
  source 1..152: mol_type = other DNA
acgtgtgttgatgcaaccataaagtgatatttaataattatttataatcagcaacttaaccacaaaacaaccatatattgatatctcacaaaacaaccataagttgatatttttgtgaatcgagtatttcagcaaaactactgcagtaagaa

SEQ ID NO: 3842 - DNA, 152 bp, synthetic construct
  source 1..152: mol_type = other DNA
aagtgggttgatgcaaccataaagtgatatttaataattatttataatcagcaacttaaccacaaaacaaccatatattgatatctcacaaaacaaccataagttgatatttttgtgaatcgagtatttcagcaaaactactgcagtaagaa

SEQ ID NO: 3843 - DNA, 152 bp, synthetic construct
  source 1..152: mol_type = other DNA
aattggtttgatgcaaccataaagtgatatttaataattatttataatcagcaacttaaccacaaaacaaccatatattgatatctcacaaaacaaccataagttgatatttttgtgaatcgagtatttcagcaaaactactgcagtaagaa

SEQ ID NO: 3844 - DNA, 152 bp, synthetic construct
  source 1..152: mol_type = other DNA
aatgggtgtgatgcaaccataaagtgatatttaataattatttataatcagcaacttaaccacaaaacaaccatatattgatatctcacaaaacaaccataagttgatatttttgtgaatcgagtatttcagcaaaactactgcagtaagaa

SEQ ID NO: 3845 - DNA, 152 bp, synthetic construct
  source 1..152: mol_type = other DNA
aatgtgtgggatgcaaccataaagtgatatttaataattatttataatcagcaacttaaccacaaaacaaccatatattgatatctcacaaaacaaccataagttgatatttttgtgaatcgagtatttcagcaaaactactgcagtaagaa

SEQ ID NO: 3846 - DNA, 152 bp, synthetic construct
  source 1..152: mol_type = other DNA
aatgtttggtatgcaaccataaagtgatatttaataattatttataatcagcaacttaaccacaaaacaaccatatattgatatctcacaaaacaaccataagttgatatttttgtgaatcgagtatttcagcaaaactactgcagtaagaa

SEQ ID NO: 3847 - DNA, 152 bp, synthetic construct
  source 1..152: mol_type = other DNA
aatgttgggtctgcaaccataaagtgatatttaataattatttataatcagcaacttaaccacaaaacaaccatatattgatatctcacaaaacaaccataagttgatatttttgtgaatcgagtatttcagcaaaactactgcagtaagaa

SEQ ID NO: 3848 - DNA, 152 bp, synthetic construct
  source 1..152: mol_type = other DNA
aatgttgtgtcggcaaccataaagtgatatttaataattatttataatcagcaacttaaccacaaaacaaccatatattgatatctcacaaaacaaccataagttgatatttttgtgaatcgagtatttcagcaaaactactgcagtaagaa

SEQ ID NO: 3849 - DNA, 152 bp, synthetic construct
  source 1..152: mol_type = other DNA
aatgttgtttcgtcaaccataaagtgatatttaataattatttataatcagcaacttaaccacaaaacaaccatatattgatatctcacaaaacaaccataagttgatatttttgtgaatcgagtatttcagcaaaactactgcagtaagaa

SEQ ID NO: 3850 - DNA, 152 bp, synthetic construct
  source 1..152: mol_type = other DNA
aatgttgttgcgtaaaccataaagtgatatttaataattatttataatcagcaacttaaccacaaaacaaccatatattgatatctcacaaaacaaccataagttgatatttttgtgaatcgagtatttcagcaaaactactgcagtaagaa

SEQ ID NO: 3851 - DNA, 152 bp, synthetic construct
  source 1..152: mol_type = other DNA
aatgttgttgagtacaccataaagtgatatttaataattatttataatcagcaacttaaccacaaaacaaccatatattgatatctcacaaaacaaccataagttgatatttttgtgaatcgagtatttcagcaaaactactgcagtaagaa

SEQ ID NO: 3852 - DNA, 152 bp, synthetic construct
  source 1..152: mol_type = other DNA
aatgttgttgattaccccataaagtgatatttaataattatttataatcagcaacttaaccacaaaacaaccatatattgatatctcacaaaacaaccataagttgatatttttgtgaatcgagtatttcagcaaaactactgcagtaagaa

SEQ ID NO: 3853 - DNA, 152 bp, synthetic construct
  source 1..152: mol_type = other DNA
aatgttgttgatgaccacataaagtgatatttaataattatttataatcagcaacttaaccacaaaacaaccatatattgatatctcacaaaacaaccataagttgatatttttgtgaatcgagtatttcagcaaaactactgcagtaagaa

SEQ ID NO: 3854 - DNA, 152 bp, synthetic construct
  source 1..152: mol_type = other DNA
aatgttgttgatgcccaaataaagtgatatttaataattatttataatcagcaacttaaccacaaaacaaccatatattgatatctcacaaaacaaccataagttgatatttttgtgaatcgagtatttcagcaaaactactgcagtaagaa

SEQ ID NO: 3855 - DNA, 152 bp, synthetic construct
  source 1..152: mol_type = other DNA
aatgttgttgatgcacaactaaagtgatatttaataattatttataatcagcaacttaaccacaaaacaaccatatattgatatctcacaaaacaaccataagttgatatttttgtgaatcgagtatttcagcaaaactactgcagtaagaa

SEQ ID NO: 3856 - DNA, 152 bp, synthetic construct
  source 1..152: mol_type = other DNA
aatgttgttgatgcaaaacgaaagtgatatttaataattatttataatcagcaacttaaccacaaaacaaccatatattgatatctcacaaaacaaccataagttgatatttttgtgaatcgagtatttcagcaaaactactgcagtaagaa

SEQ ID NO: 3857 - DNA, 152 bp, synthetic construct
  source 1..152: mol_type = other DNA
aatgttgttgatgcaacacgcaagtgatatttaataattatttataatcagcaacttaaccacaaaacaaccatatattgatatctcacaaaacaaccataagttgatatttttgtgaatcgagtatttcagcaaaactactgcagtaagaa

SEQ ID NO: 3858 - DNA, 152 bp, synthetic construct
  source 1..152: mol_type = other DNA
aatgttgttgatgcaacccgccagtgatatttaataattatttataatcagcaacttaaccacaaaacaaccatatattgatatctcacaaaacaaccataagttgatatttttgtgaatcgagtatttcagcaaaactactgcagtaagaa

SEQ ID NO: 3859 - DNA, 152 bp, synthetic construct
  source 1..152: mol_type = other DNA
aatgttgttgatgcaaccagcccgtgatatttaataattatttataatcagcaacttaaccacaaaacaaccatatattgatatctcacaaaacaaccataagttgatatttttgtgaatcgagtatttcagcaaaactactgcagtaagaa

SEQ ID NO: 3860 - DNA, 152 bp, synthetic construct
  source 1..152: mol_type = other DNA
aatgttgttgatgcaaccatcccttgatatttaataattatttataatcagcaacttaaccacaaaacaaccatatattgatatctcacaaaacaaccataagttgatatttttgtgaatcgagtatttcagcaaaactactgcagtaagaa

SEQ ID NO: 3861 - DNA, 152 bp, synthetic construct
  source 1..152: mol_type = other DNA
aatgttgttgatgcaaccatacctggatatttaataattatttataatcagcaacttaaccacaaaacaaccatatattgatatctcacaaaacaaccataagttgatatttttgtgaatcgagtatttcagcaaaactactgcagtaagaa

SEQ ID NO: 3862 - DNA, 152 bp, synthetic construct
  source 1..152: mol_type = other DNA
aatgttgttgatgcaaccataactgtatatttaataattatttataatcagcaacttaaccacaaaacaaccatatattgatatctcacaaaacaaccataagttgatatttttgtgaatcgagtatttcagcaaaactactgcagtaagaa

SEQ ID NO: 3863 - DNA, 152 bp, synthetic construct
  source 1..152: mol_type = other DNA
aatgttgttgatgcaaccataaatgtctatttaataattatttataatcagcaacttaaccacaaaacaaccatatattgatatctcacaaaacaaccataagttgatatttttgtgaatcgagtatttcagcaaaactactgcagtaagaa

SEQ ID NO: 3864 - DNA, 152 bp, synthetic construct
  source 1..152: mol_type = other DNA
aatgttgttgatgcaaccataaaggtcgatttaataattatttataatcagcaacttaaccacaaaacaaccatatattgatatctcacaaaacaaccataagttgatatttttgtgaatcgagtatttcagcaaaactactgcagtaagaa

SEQ ID NO: 3865 - DNA, 152 bp, synthetic construct
  source 1..152: mol_type = other DNA
aatgttgttgatgcaaccataaagttcgctttaataattatttataatcagcaacttaaccacaaaacaaccatatattgatatctcacaaaacaaccataagttgatatttttgtgaatcgagtatttcagcaaaactactgcagtaagaa

SEQ ID NO: 3866 - DNA, 152 bp, synthetic construct
  source 1..152: mol_type = other DNA
aatgttgttgatgcaaccataaagtgcgcgttaataattatttataatcagcaacttaaccacaaaacaaccatatattgatatctcacaaaacaaccataagttgatatttttgtgaatcgagtatttcagcaaaactactgcagtaagaa

SEQ ID NO: 3867 - DNA, 152 bp, synthetic construct
  source 1..152: mol_type = other DNA
aatgttgttgatgcaaccataaagtgagcggtaataattatttataatcagcaacttaaccacaaaacaaccatatattgatatctcacaaaacaaccataagttgatatttttgtgaatcgagtatttcagcaaaactactgcagtaagaa

SEQ ID NO: 3868 - DNA, 152 bp, synthetic construct
  source 1..152: mol_type = other DNA
aatgttgttgatgcaaccataaagtgatcgggaataattatttataatcagcaacttaaccacaaaacaaccatatattgatatctcacaaaacaaccataagttgatatttttgtgaatcgagtatttcagcaaaactactgcagtaagaa

SEQ ID NO: 3869 - DNA, 152 bp, synthetic construct
  source 1..152: mol_type = other DNA
aatgttgttgatgcaaccataaagtgatagggcataattatttataatcagcaacttaaccacaaaacaaccatatattgatatctcacaaaacaaccataagttgatatttttgtgaatcgagtatttcagcaaaactactgcagtaagaa

SEQ ID NO: 3870 - DNA, 152 bp, synthetic construct
  source 1..152: mol_type = other DNA
aatgttgttgatgcaaccataaagtgatatggcctaattatttataatcagcaacttaaccacaaaacaaccatatattgatatctcacaaaacaaccataagttgatatttttgtgaatcgagtatttcagcaaaactactgcagtaagaa

SEQ ID NO: 3871 - DNA, 152 bp, synthetic construct
  source 1..152: mol_type = other DNA
aatgttgttgatgcaaccataaagtgatattgccgaattatttataatcagcaacttaaccacaaaacaaccatatattgatatctcacaaaacaaccataagttgatatttttgtgaatcgagtatttcagcaaaactactgcagtaagaa

SEQ ID NO: 3872 - DNA, 152 bp, synthetic construct
  source 1..152: mol_type = other DNA
aatgttgttgatgcaaccataaagtgatatttccgcattatttataatcagcaacttaaccacaaaacaaccatatattgatatctcacaaaacaaccataagttgatatttttgtgaatcgagtatttcagcaaaactactgcagtaagaa

SEQ ID NO: 3873 - DNA, 152 bp, synthetic construct
  source 1..152: mol_type = other DNA
aatgttgttgatgcaaccataaagtgatatttacgccttatttataatcagcaacttaaccacaaaacaaccatatattgatatctcacaaaacaaccataagttgatatttttgtgaatcgagtatttcagcaaaactactgcagtaagaa

SEQ ID NO: 3874 - DNA, 152 bp, synthetic construct
  source 1..152: mol_type = other DNA
aatgttgttgatgcaaccataaagtgatatttaagccgtatttataatcagcaacttaaccacaaaacaaccatatattgatatctcacaaaacaaccataagttgatatttttgtgaatcgagtatttcagcaaaactactgcagtaagaa

SEQ ID NO: 3875 - DNA, 152 bp, synthetic construct
  source 1..152: mol_type = other DNA
aatgttgttgatgcaaccataaagtgatatttaatccggatttataatcagcaacttaaccacaaaacaaccatatattgatatctcacaaaacaaccataagttgatatttttgtgaatcgagtatttcagcaaaactactgcagtaagaa

SEQ ID NO: 3876 - DNA, 152 bp, synthetic construct
  source 1..152: mol_type = other DNA
aatgttgttgatgcaaccataaagtgatatttaatacggctttataatcagcaacttaaccacaaaacaaccatatattgatatctcacaaaacaaccataagttgatatttttgtgaatcgagtatttcagcaaaactactgcagtaagaa

SEQ ID NO: 3877 - DNA, 152 bp, synthetic construct
  source 1..152: mol_type = other DNA
aatgttgttgatgcaaccataaagtgatatttaataaggcgttataatcagcaacttaaccacaaaacaaccatatattgatatctcacaaaacaaccataagttgatatttttgtgaatcgagtatttcagcaaaactactgcagtaagaa

SEQ ID NO: 3878 - DNA, 152 bp, synthetic construct
  source 1..152: mol_type = other DNA
aatgttgttgatgcaaccataaagtgatatttaataatgcggtataatcagcaacttaaccacaaaacaaccatatattgatatctcacaaaacaaccataagttgatatttttgtgaatcgagtatttcagcaaaactactgcagtaagaa

SEQ ID NO: 3879 - DNA, 152 bp, synthetic construct
  source 1..152: mol_type = other DNA
aatgttgttgatgcaaccataaagtgatatttaataattcgggataatcagcaacttaaccacaaaacaaccatatattgatatctcacaaaacaaccataagttgatatttttgtgaatcgagtatttcagcaaaactactgcagtaagaa

SEQ ID NO: 3880 - DNA, 152 bp, synthetic construct
  source 1..152: mol_type = other DNA
aatgttgttgatgcaaccataaagtgatatttaataattagggctaatcagcaacttaaccacaaaacaaccatatattgatatctcacaaaacaaccataagttgatatttttgtgaatcgagtatttcagcaaaactactgcagtaagaa

SEQ ID NO: 3881 - DNA, 152 bp, synthetic construct
  source 1..152: mol_type = other DNA
aatgttgttgatgcaaccataaagtgatatttaataattatggcgaatcagcaacttaaccacaaaacaaccatatattgatatctcacaaaacaaccataagttgatatttttgtgaatcgagtatttcagcaaaactactgcagtaagaa

SEQ ID NO: 3882 - DNA, 152 bp, synthetic construct
  source 1..152: mol_type = other DNA
aatgttgttgatgcaaccataaagtgatatttaataattattgcgcatcagcaacttaaccacaaaacaaccatatattgatatctcacaaaacaaccataagttgatatttttgtgaatcgagtatttcagcaaaactactgcagtaagaa

SEQ ID NO: 3883 - DNA, 152 bp, synthetic construct
  source 1..152: mol_type = other DNA
aatgttgttgatgcaaccataaagtgatatttaataattatttcgcctcagcaacttaaccacaaaacaaccatatattgatatctcacaaaacaaccataagttgatatttttgtgaatcgagtatttcagcaaaactactgcagtaagaa

SEQ ID NO: 3884 - DNA, 152 bp, synthetic construct
  source 1..152: mol_type = other DNA
aatgttgttgatgcaaccataaagtgatatttaataattatttagccgcagcaacttaaccacaaaacaaccatatattgatatctcacaaaacaaccataagttgatatttttgtgaatcgagtatttcagcaaaactactgcagtaagaa

SEQ ID NO: 3885 - DNA, 152 bp, synthetic construct
  source 1..152: mol_type = other DNA
aatgttgttgatgcaaccataaagtgatatttaataattatttatccgaagcaacttaaccacaaaacaaccatatattgatatctcacaaaacaaccataagttgatatttttgtgaatcgagtatttcagcaaaactactgcagtaagaa

SEQ ID NO: 3886 - DNA, 152 bp, synthetic construct
  source 1..152: mol_type = other DNA
aatgttgttgatgcaaccataaagtgatatttaataattatttatacgacgcaacttaaccacaaaacaaccatatattgatatctcacaaaacaaccataagttgatatttttgtgaatcgagtatttcagcaaaactactgcagtaagaa

SEQ ID NO: 3887 - DNA, 152 bp, synthetic construct
  source 1..152: mol_type = other DNA
aatgttgttgatgcaaccataaagtgatatttaataattatttataagactcaacttaaccacaaaacaaccatatattgatatctcacaaaacaaccataagttgatatttttgtgaatcgagtatttcagcaaaactactgcagtaagaa

SEQ ID NO: 3888 - DNA, 152 bp, synthetic construct
  source 1..152: mol_type = other DNA
aatgttgttgatgcaaccataaagtgatatttaataattatttataatactaaacttaaccacaaaacaaccatatattgatatctcacaaaacaaccataagttgatatttttgtgaatcgagtatttcagcaaaactactgcagtaagaa

SEQ ID NO: 3889 - DNA, 152 bp, synthetic construct
  source 1..152: mol_type = other DNA
aatgttgttgatgcaaccataaagtgatatttaataattatttataatcctacacttaaccacaaaacaaccatatattgatatctcacaaaacaaccataagttgatatttttgtgaatcgagtatttcagcaaaactactgcagtaagaa

SEQ ID NO: 3890 - DNA, 152 bp, synthetic construct
  source 1..152: mol_type = other DNA
aatgttgttgatgcaaccataaagtgatatttaataattatttataatcatacccttaaccacaaaacaaccatatattgatatctcacaaaacaaccataagttgatatttttgtgaatcgagtatttcagcaaaactactgcagtaagaa

SEQ ID NO: 3891 - DNA, 152 bp, synthetic construct
  source 1..152: mol_type = other DNA
aatgttgttgatgcaaccataaagtgatatttaataattatttataatcagaccattaaccacaaaacaaccatatattgatatctcacaaaacaaccataagttgatatttttgtgaatcgagtatttcagcaaaactactgcagtaagaa

SEQ ID NO: 3892 - DNA, 152 bp, synthetic construct
  source 1..152: mol_type = other DNA
aatgttgttgatgcaaccataaagtgatatttaataattatttataatcagcccagtaaccacaaaacaaccatatattgatatctcacaaaacaaccataagttgatatttttgtgaatcgagtatttcagcaaaactactgcagtaagaa

SEQ ID NO: 3893 - DNA, 152 bp, synthetic construct
  source 1..152: mol_type = other DNA
aatgttgttgatgcaaccataaagtgatatttaataattatttataatcagcacaggaaccacaaaacaaccatatattgatatctcacaaaacaaccataagttgatatttttgtgaatcgagtatttcagcaaaactactgcagtaagaa

SEQ ID NO: 3894 - DNA, 152 bp, synthetic construct
  source 1..152: mol_type = other DNA
aatgttgttgatgcaaccataaagtgatatttaataattatttataatcagcaaaggcaccacaaaacaaccatatattgatatctcacaaaacaaccataagttgatatttttgtgaatcgagtatttcagcaaaactactgcagtaagaa

SEQ ID NO: 3895 - DNA, 152 bp, synthetic construct
  source 1..152: mol_type = other DNA
aatgttgttgatgcaaccataaagtgatatttaataattatttataatcagcaacggccccacaaaacaaccatatattgatatctcacaaaacaaccataagttgatatttttgtgaatcgagtatttcagcaaaactactgcagtaagaa

SEQ ID NO: 3896 - DNA, 152 bp, synthetic construct
  source 1..152: mol_type = other DNA
aatgttgttgatgcaaccataaagtgatatttaataattatttataatcagcaactgccacacaaaacaaccatatattgatatctcacaaaacaaccataagttgatatttttgtgaatcgagtatttcagcaaaactactgcagtaagaa

SEQ ID NO: 3897 - DNA, 152 bp, synthetic construct
  source 1..152: mol_type = other DNA
aatgttgttgatgcaaccataaagtgatatttaataattatttataatcagcaacttccaaacaaaacaaccatatattgatatctcacaaaacaaccataagttgatatttttgtgaatcgagtatttcagcaaaactactgcagtaagaa

SEQ ID NO: 3898 - DNA, 152 bp, synthetic construct
  source 1..152: mol_type = other DNA
aatgttgttgatgcaaccataaagtgatatttaataattatttataatcagcaacttacaaccaaaacaaccatatattgatatctcacaaaacaaccataagttgatatttttgtgaatcgagtatttcagcaaaactactgcagtaagaa

SEQ ID NO: 3899 - DNA, 152 bp, synthetic construct
  source 1..152: mol_type = other DNA
aatgttgttgatgcaaccataaagtgatatttaataattatttataatcagcaacttaaaacaaaaacaaccatatattgatatctcacaaaacaaccataagttgatatttttgtgaatcgagtatttcagcaaaactactgcagtaagaa

SEQ ID NO: 3900 - DNA, 152 bp, synthetic construct
  source 1..152: mol_type = other DNA
aatgttgttgatgcaaccataaagtgatatttaataattatttataatcagcaacttaacacacaaacaaccatatattgatatctcacaaaacaaccataagttgatatttttgtgaatcgagtatttcagcaaaactactgcagtaagaa

SEQ ID NO: 3901 - DNA, 152 bp, synthetic construct
  source 1..152: mol_type = other DNA
aatgttgttgatgcaaccataaagtgatatttaataattatttataatcagcaacttaacccaccaacaaccatatattgatatctcacaaaacaaccataagttgatatttttgtgaatcgagtatttcagcaaaactactgcagtaagaa

SEQ ID NO: 3902 - DNA, 152 bp, synthetic construct
  source 1..152: mol_type = other DNA
aatgttgttgatgcaaccataaagtgatatttaataattatttataatcagcaacttaaccaacccacaaccatatattgatatctcacaaaacaaccataagttgatatttttgtgaatcgagtatttcagcaaaactactgcagtaagaa

SEQ ID NO: 3903 - DNA, 152 bp, synthetic construct
  source 1..152: mol_type = other DNA
aatgttgttgatgcaaccataaagtgatatttaataattatttataatcagcaacttaaccaccccccaaccatatattgatatctcacaaaacaaccataagttgatatttttgtgaatcgagtatttcagcaaaactactgcagtaagaa

SEQ ID NO: 3904 - DNA, 152 bp, synthetic construct
  source 1..152: mol_type = other DNA
aatgttgttgatgcaaccataaagtgatatttaataattatttataatcagcaacttaaccacacccaaaccatatattgatatctcacaaaacaaccataagttgatatttttgtgaatcgagtatttcagcaaaactactgcagtaagaa

SEQ ID NO: 3905 - DNA, 152 bp, synthetic construct
  source 1..152: mol_type = other DNA
aatgttgttgatgcaaccataaagtgatatttaataattatttataatcagcaacttaaccacaaccacaccatatattgatatctcacaaaacaaccataagttgatatttttgtgaatcgagtatttcagcaaaactactgcagtaagaa

SEQ ID NO: 3906 - DNA, 152 bp, synthetic construct
  source 1..152: mol_type = other DNA
aatgttgttgatgcaaccataaagtgatatttaataattatttataatcagcaacttaaccacaaacaccccatatattgatatctcacaaaacaaccataagttgatatttttgtgaatcgagtatttcagcaaaactactgcagtaagaa

SEQ ID NO: 3907 - DNA, 152 bp, synthetic construct
  source 1..152: mol_type = other DNA
aatgttgttgatgcaaccataaagtgatatttaataattatttataatcagcaacttaaccacaaaaaccacatatattgatatctcacaaaacaaccataagttgatatttttgtgaatcgagtatttcagcaaaactactgcagtaagaa

SEQ ID NO: 3908 - DNA, 152 bp, synthetic construct
  source 1..152: mol_type = other DNA
aatgttgttgatgcaaccataaagtgatatttaataattatttataatcagcaacttaaccacaaaacccaaatatattgatatctcacaaaacaaccataagttgatatttttgtgaatcgagtatttcagcaaaactactgcagtaagaa

SEQ ID NO: 3909 - DNA, 152 bp, synthetic construct
  source 1..152: mol_type = other DNA
aatgttgttgatgcaaccataaagtgatatttaataattatttataatcagcaacttaaccacaaaacacaactatattgatatctcacaaaacaaccataagttgatatttttgtgaatcgagtatttcagcaaaactactgcagtaagaa

SEQ ID NO: 3910 - DNA, 152 bp, synthetic construct
  source 1..152: mol_type = other DNA
aatgttgttgatgcaaccataaagtgatatttaataattatttataatcagcaacttaaccacaaaacaaaacgatattgatatctcacaaaacaaccataagttgatatttttgtgaatcgagtatttcagcaaaactactgcagtaagaa

SEQ ID NO: 3911 - DNA, 152 bp, synthetic construct
  source 1..152: mol_type = other DNA
aatgttgttgatgcaaccataaagtgatatttaataattatttataatcagcaacttaaccacaaaacaacacgctattgatatctcacaaaacaaccataagttgatatttttgtgaatcgagtatttcagcaaaactactgcagtaagaa

SEQ ID NO: 3912 - DNA, 152 bp, synthetic construct
  source 1..152: mol_type = other DNA
aatgttgttgatgcaaccataaagtgatatttaataattatttataatcagcaacttaaccacaaaacaacccgcgattgatatctcacaaaacaaccataagttgatatttttgtgaatcgagtatttcagcaaaactactgcagtaagaa

SEQ ID NO: 3913 - DNA, 152 bp, synthetic construct
  source 1..152: mol_type = other DNA
aatgttgttgatgcaaccataaagtgatatttaataattatttataatcagcaacttaaccacaaaacaaccagcgcttgatatctcacaaaacaaccataagttgatatttttgtgaatcgagtatttcagcaaaactactgcagtaagaa

SEQ ID NO: 3914 - DNA, 152 bp, synthetic construct
  source 1..152: mol_type = other DNA
aatgttgttgatgcaaccataaagtgatatttaataattatttataatcagcaacttaaccacaaaacaaccatcgcgtgatatctcacaaaacaaccataagttgatatttttgtgaatcgagtatttcagcaaaactactgcagtaagaa

SEQ ID NO: 3915 - DNA, 152 bp, synthetic construct
  source 1..152: mol_type = other DNA
aatgttgttgatgcaaccataaagtgatatttaataattatttataatcagcaacttaaccacaaaacaaccatagcgggatatctcacaaaacaaccataagttgatatttttgtgaatcgagtatttcagcaaaactactgcagtaagaa

SEQ ID NO: 3916 - DNA, 152 bp, synthetic construct
  source 1..152: mol_type = other DNA
aatgttgttgatgcaaccataaagtgatatttaataattatttataatcagcaacttaaccacaaaacaaccatatcggtatatctcacaaaacaaccataagttgatatttttgtgaatcgagtatttcagcaaaactactgcagtaagaa

SEQ ID NO: 3917 - DNA, 152 bp, synthetic construct
  source 1..152: mol_type = other DNA
aatgttgttgatgcaaccataaagtgatatttaataattatttataatcagcaacttaaccacaaaacaaccatataggtctatctcacaaaacaaccataagttgatatttttgtgaatcgagtatttcagcaaaactactgcagtaagaa

SEQ ID NO: 3918 - DNA, 152 bp, synthetic construct
  source 1..152: mol_type = other DNA
aatgttgttgatgcaaccataaagtgatatttaataattatttataatcagcaacttaaccacaaaacaaccatatatgtcgatctcacaaaacaaccataagttgatatttttgtgaatcgagtatttcagcaaaactactgcagtaagaa

SEQ ID NO: 3919 - DNA, 152 bp, synthetic construct
  source 1..152: mol_type = other DNA
aatgttgttgatgcaaccataaagtgatatttaataattatttataatcagcaacttaaccacaaaacaaccatatatttcgctctcacaaaacaaccataagttgatatttttgtgaatcgagtatttcagcaaaactactgcagtaagaa

SEQ ID NO: 3920 - DNA, 152 bp, synthetic construct
  source 1..152: mol_type = other DNA
aatgttgttgatgcaaccataaagtgatatttaataattatttataatcagcaacttaaccacaaaacaaccatatattgcgcgctcacaaaacaaccataagttgatatttttgtgaatcgagtatttcagcaaaactactgcagtaagaa

SEQ ID NO: 3921 - DNA, 152 bp, synthetic construct
  source 1..152: mol_type = other DNA
aatgttgttgatgcaaccataaagtgatatttaataattatttataatcagcaacttaaccacaaaacaaccatatattgagcgatcacaaaacaaccataagttgatatttttgtgaatcgagtatttcagcaaaactactgcagtaagaa

SEQ ID NO: 3922 - DNA, 152 bp, synthetic construct
  source 1..152: mol_type = other DNA
aatgttgttgatgcaaccataaagtgatatttaataattatttataatcagcaacttaaccacaaaacaaccatatattgatcgagcacaaaacaaccataagttgatatttttgtgaatcgagtatttcagcaaaactactgcagtaagaa

SEQ ID NO: 3923 - DNA, 152 bp, synthetic construct
  source 1..152: mol_type = other DNA
aatgttgttgatgcaaccataaagtgatatttaataattatttataatcagcaacttaaccacaaaacaaccatatattgatagagaacaaaacaaccataagttgatatttttgtgaatcgagtatttcagcaaaactactgcagtaagaa

SEQ ID NO: 3924 - DNA, 152 bp, synthetic construct
  source 1..152: mol_type = other DNA
aatgttgttgatgcaaccataaagtgatatttaataattatttataatcagcaacttaaccacaaaacaaccatatattgatatagaccaaaacaaccataagttgatatttttgtgaatcgagtatttcagcaaaactactgcagtaagaa

SEQ ID NO: 3925 - DNA, 152 bp, synthetic construct
  source 1..152: mol_type = other DNA
aatgttgttgatgcaaccataaagtgatatttaataattatttataatcagcaacttaaccacaaaacaaccatatattgatatcgacaaaaacaaccataagttgatatttttgtgaatcgagtatttcagcaaaactactgcagtaagaa

SEQ ID NO: 3926 - DNA, 152 bp, synthetic construct
  source 1..152: mol_type = other DNA
aatgttgttgatgcaaccataaagtgatatttaataattatttataatcagcaacttaaccacaaaacaaccatatattgatatctacacaaacaaccataagttgatatttttgtgaatcgagtatttcagcaaaactactgcagtaagaa

SEQ ID NO: 3927 - DNA, 152 bp, synthetic construct
  source 1..152: mol_type = other DNA
aatgttgttgatgcaaccataaagtgatatttaataattatttataatcagcaacttaaccacaaaacaaccatatattgatatctccaccaacaaccataagttgatatttttgtgaatcgagtatttcagcaaaactactgcagtaagaa

SEQ ID NO: 3928 - DNA, 152 bp, synthetic construct
  source 1..152: mol_type = other DNA
aatgttgttgatgcaaccataaagtgatatttaataattatttataatcagcaacttaaccacaaaacaaccatatattgatatctcaacccacaaccataagttgatatttttgtgaatcgagtatttcagcaaaactactgcagtaagaa

SEQ ID NO: 3929 - DNA, 152 bp, synthetic construct
  source 1..152: mol_type = other DNA
aatgttgttgatgcaaccataaagtgatatttaataattatttataatcagcaacttaaccacaaaacaaccatatattgatatctcaccccccaaccataagttgatatttttgtgaatcgagtatttcagcaaaactactgcagtaagaa

SEQ ID NO: 3930 - DNA, 152 bp, synthetic construct
  source 1..152: mol_type = other DNA
aatgttgttgatgcaaccataaagtgatatttaataattatttataatcagcaacttaaccacaaaacaaccatatattgatatctcacacccaaaccataagttgatatttttgtgaatcgagtatttcagcaaaactactgcagtaagaa

SEQ ID NO: 3931 - DNA, 152 bp, synthetic construct
  source 1..152: mol_type = other DNA
aatgttgttgatgcaaccataaagtgatatttaataattatttataatcagcaacttaaccacaaaacaaccatatattgatatctcacaaccacaccataagttgatatttttgtgaatcgagtatttcagcaaaactactgcagtaagaa

SEQ ID NO: 3932 - DNA, 152 bp, synthetic construct
  source 1..152: mol_type = other DNA
aatgttgttgatgcaaccataaagtgatatttaataattatttataatcagcaacttaaccacaaaacaaccatatattgatatctcacaaacaccccataagttgatatttttgtgaatcgagtatttcagcaaaactactgcagtaagaa

SEQ ID NO: 3933 - DNA, 152 bp, synthetic construct
  source 1..152: mol_type = other DNA
aatgttgttgatgcaaccataaagtgatatttaataattatttataatcagcaacttaaccacaaaacaaccatatattgatatctcacaaaaaccacataagttgatatttttgtgaatcgagtatttcagcaaaactactgcagtaagaa

SEQ ID NO: 3934 - DNA, 152 bp, synthetic construct
  source 1..152: mol_type = other DNA
aatgttgttgatgcaaccataaagtgatatttaataattatttataatcagcaacttaaccacaaaacaaccatatattgatatctcacaaaacccaaataagttgatatttttgtgaatcgagtatttcagcaaaactactgcagtaagaa

SEQ ID NO: 3935 - DNA, 152 bp, synthetic construct
  source 1..152: mol_type = other DNA
aatgttgttgatgcaaccataaagtgatatttaataattatttataatcagcaacttaaccacaaaacaaccatatattgatatctcacaaaacacaactaagttgatatttttgtgaatcgagtatttcagcaaaactactgcagtaagaa

SEQ ID NO: 3936 - DNA, 152 bp, synthetic construct
  source 1..152: mol_type = other DNA
aatgttgttgatgcaaccataaagtgatatttaataattatttataatcagcaacttaaccacaaaacaaccatatattgatatctcacaaaacaaaacgaagttgatatttttgtgaatcgagtatttcagcaaaactactgcagtaagaa

SEQ ID NO: 3937 - DNA, 152 bp, synthetic construct
  source 1..152: mol_type = other DNA
aatgttgttgatgcaaccataaagtgatatttaataattatttataatcagcaacttaaccacaaaacaaccatatattgatatctcacaaaacaacacgcagttgatatttttgtgaatcgagtatttcagcaaaactactgcagtaagaa

SEQ ID NO: 3938 - DNA, 152 bp, synthetic construct
  source 1..152: mol_type = other DNA
aatgttgttgatgcaaccataaagtgatatttaataattatttataatcagcaacttaaccacaaaacaaccatatattgatatctcacaaaacaacccgccgttgatatttttgtgaatcgagtatttcagcaaaactactgcagtaagaa

SEQ ID NO: 3939 - DNA, 152 bp, synthetic construct
  source 1..152: mol_type = other DNA
aatgttgttgatgcaaccataaagtgatatttaataattatttataatcagcaacttaaccacaaaacaaccatatattgatatctcacaaaacaaccagcctttgatatttttgtgaatcgagtatttcagcaaaactactgcagtaagaa

SEQ ID NO: 3940 - DNA, 152 bp, synthetic construct
  source 1..152: mol_type = other DNA
aatgttgttgatgcaaccataaagtgatatttaataattatttataatcagcaacttaaccacaaaacaaccatatattgatatctcacaaaacaaccatcctgtgatatttttgtgaatcgagtatttcagcaaaactactgcagtaagaa

SEQ ID NO: 3941 - DNA, 152 bp, synthetic construct
  source 1..152: mol_type = other DNA
aatgttgttgatgcaaccataaagtgatatttaataattatttataatcagcaacttaaccacaaaacaaccatatattgatatctcacaaaacaaccatactgggatatttttgtgaatcgagtatttcagcaaaactactgcagtaagaa

SEQ ID NO: 3942 - DNA, 152 bp, synthetic construct
  source 1..152: mol_type = other DNA
aatgttgttgatgcaaccataaagtgatatttaataattatttataatcagcaacttaaccacaaaacaaccatatattgatatctcacaaaacaaccataatggtatatttttgtgaatcgagtatttcagcaaaactactgcagtaagaa

SEQ ID NO: 3943 - DNA, 152 bp, synthetic construct
  source 1..152: mol_type = other DNA
aatgttgttgatgcaaccataaagtgatatttaataattatttataatcagcaacttaaccacaaaacaaccatatattgatatctcacaaaacaaccataagggtctatttttgtgaatcgagtatttcagcaaaactactgcagtaagaa

SEQ ID NO: 3944 - DNA, 152 bp, synthetic construct
  source 1..152: mol_type = other DNA
aatgttgttgatgcaaccataaagtgatatttaataattatttataatcagcaacttaaccacaaaacaaccatatattgatatctcacaaaacaaccataagtgtcgatttttgtgaatcgagtatttcagcaaaactactgcagtaagaa

SEQ ID NO: 3945 - DNA, 152 bp, synthetic construct
  source 1..152: mol_type = other DNA
aatgttgttgatgcaaccataaagtgatatttaataattatttataatcagcaacttaaccacaaaacaaccatatattgatatctcacaaaacaaccataagtttcgctttttgtgaatcgagtatttcagcaaaactactgcagtaagaa

SEQ ID NO: 3946 - DNA, 152 bp, synthetic construct
  source 1..152: mol_type = other DNA
aatgttgttgatgcaaccataaagtgatatttaataattatttataatcagcaacttaaccacaaaacaaccatatattgatatctcacaaaacaaccataagttgcgcgttttgtgaatcgagtatttcagcaaaactactgcagtaagaa

SEQ ID NO: 3947 - DNA, 152 bp, synthetic construct
  source 1..152: mol_type = other DNA
aatgttgttgatgcaaccataaagtgatatttaataattatttataatcagcaacttaaccacaaaacaaccatatattgatatctcacaaaacaaccataagttgagcggtttgtgaatcgagtatttcagcaaaactactgcagtaagaa

SEQ ID NO: 3948 - DNA, 152 bp, synthetic construct
  source 1..152: mol_type = other DNA
aatgttgttgatgcaaccataaagtgatatttaataattatttataatcagcaacttaaccacaaaacaaccatatattgatatctcacaaaacaaccataagttgatcgggttgtgaatcgagtatttcagcaaaactactgcagtaagaa

SEQ ID NO: 3949 - DNA, 152 bp, synthetic construct
  source 1..152: mol_type = other DNA
aatgttgttgatgcaaccataaagtgatatttaataattatttataatcagcaacttaaccacaaaacaaccatatattgatatctcacaaaacaaccataagttgataggggtgtgaatcgagtatttcagcaaaactactgcagtaagaa

SEQ ID NO: 3950 - DNA, 152 bp, synthetic construct
  source 1..152: mol_type = other DNA
aatgttgttgatgcaaccataaagtgatatttaataattatttataatcagcaacttaaccacaaaacaaccatatattgatatctcacaaaacaaccataagttgatatgggggtgaatcgagtatttcagcaaaactactgcagtaagaa

SEQ ID NO: 3951 - DNA, 152 bp, synthetic construct
  source 1..152: mol_type = other DNA
aatgttgttgatgcaaccataaagtgatatttaataattatttataatcagcaacttaaccacaaaacaaccatatattgatatctcacaaaacaaccataagttgatattgggttgaatcgagtatttcagcaaaactactgcagtaagaa

SEQ ID NO: 3952 - DNA, 152 bp, synthetic construct
  source 1..152: mol_type = other DNA
aatgttgttgatgcaaccataaagtgatatttaataattatttataatcagcaacttaaccacaaaacaaccatatattgatatctcacaaaacaaccataagttgatatttggtggaatcgagtatttcagcaaaactactgcagtaagaa

SEQ ID NO: 3953 - DNA, 152 bp, synthetic construct
  source 1..152: mol_type = other DNA
aatgttgttgatgcaaccataaagtgatatttaataattatttataatcagcaacttaaccacaaaacaaccatatattgatatctcacaaaacaaccataagttgatattttgtgtaatcgagtatttcagcaaaactactgcagtaagaa

SEQ ID NO: 3954 - DNA, 152 bp, synthetic construct
  source 1..152: mol_type = other DNA
aatgttgttgatgcaaccataaagtgatatttaataattatttataatcagcaacttaaccacaaaacaaccatatattgatatctcacaaaacaaccataagttgatattttttgtcatcgagtatttcagcaaaactactgcagtaagaa

SEQ ID NO: 3955 - DNA, 152 bp, synthetic construct
  source 1..152: mol_type = other DNA
aatgttgttgatgcaaccataaagtgatatttaataattatttataatcagcaacttaaccacaaaacaaccatatattgatatctcacaaaacaaccataagttgatatttttggtcctcgagtatttcagcaaaactactgcagtaagaa

SEQ ID NO: 3956 - DNA, 152 bp, synthetic construct
  source 1..152: mol_type = other DNA
aatgttgttgatgcaaccataaagtgatatttaataattatttataatcagcaacttaaccacaaaacaaccatatattgatatctcacaaaacaaccataagttgatatttttgttccgcgagtatttcagcaaaactactgcagtaagaa

SEQ ID NO: 3957 - DNA, 152 bp, synthetic construct
  source 1..152: mol_type = other DNA
aatgttgttgatgcaaccataaagtgatatttacgccggcgggcgccgactaccaggccaacacccccaaccatatattgatatctcacaaaacaaccataagttgatatttttgtgaatcgagtatttcagcaaaactactgcagtaagaa

SEQ ID NO: 3958 - DNA, 152 bp, synthetic construct
  source 1..152: mol_type = other DNA
aatgttgttgatgcaaccataaagtgatatttaataattatttataagactaccaggcaccacaaaacaaccatatattgatatctcacaaaacaaccataagttgatatttttgtgaatcgagtatttcagcaaaactactgcagtaagaa

SEQ ID NO: 3959 - DNA, 152 bp, synthetic construct
  source 1..152: mol_type = other DNA
aatgttgttgatgcaaccataaagtgatatttaatgattatttataatcagcaacttaaccacagcacaaccatatattgatatctcacaaaacaaccataagttgatatttttgtgaatcgagtatttcagcaaaactactgcagtaagaa

SEQ ID NO: 3960 - DNA, 152 bp, synthetic construct
  source 1..152: mol_type = other DNA
aatgttgttgatgcaaccataaagtgatatttaatgattatctataatcagcaacttaaccgcagcacaaccatatattgatatctcacaaaacaaccataagttgatatttttgtgaatcgagtatttcagcaaaactactgcagtaagaa

SEQ ID NO: 3961 - DNA, 152 bp, synthetic construct
  source 1..152: mol_type = other DNA
aatgttgttgatgcaaccataaagtgatatttactgactatctataatcagcaacttaaccgcagcacaaccatatattgatatctcacaaaacaaccataagttgatatttttgtgaatcgagtatttcagcaaaactactgcagtaagaa

SEQ ID NO: 3962 - DNA, 152 bp, synthetic construct
  source 1..152: mol_type = other DNA
aatgttgttgatgcaaccataaagtgatatttactgactgtctataatcagcaacttaaccgcagcacaaccatatattgatatctcacaaaacaaccataagttgatatttttgtgaatcgagtatttcagcaaaactactgcagtaagaa

SEQ ID NO: 3963 - DNA, 152 bp, synthetic construct
  source 1..152: mol_type = other DNA
aatgttgttgatgcaaccataaagtgatatttaccgactgtctgtaatcagcaacttaaccgcagcacaaccatatattgatatctcacaaaacaaccataagttgatatttttgtgaatcgagtatttcagcaaaactactgcagtaagaa

SEQ ID NO: 3964 - DNA, 152 bp, synthetic construct
  source 1..152: mol_type = other DNA
aatgttgttgatgcaaccataaagtgatatttaccgactgtctgccatcagcaacttaaccgcagcacaaccatatattgatatctcacaaaacaaccataagttgatatttttgtgaatcgagtatttcagcaaaactactgcagtaagaa

SEQ ID NO: 3965 - DNA, 152 bp, synthetic construct
  source 1..152: mol_type = other DNA
aatgttgttgatgcaaccataaagtgatatttaccgactgtctgccatcagccacttaaccgcagcacaaccatatattgatatctcacaaaacaaccataagttgatatttttgtgaatcgagtatttcagcaaaactactgcagtaagaa

SEQ ID NO: 3966 - DNA, 152 bp, synthetic construct
  source 1..152: mol_type = other DNA
aatgttgttgatgcaaccataaagtgatatttaccgactgtctgccatcagccgcttaaccgcagcccaaccatatattgatatctcacaaaacaaccataagttgatatttttgtgaatcgagtatttcagcaaaactactgcagtaagaa

SEQ ID NO: 3967 - DNA, 152 bp, synthetic construct
  source 1..152: mol_type = other DNA
aatgttgttgatgcaaccataaagtgatatttaccgactgtctgccatccgccgctgaaccgcagcccaaccatatattgatatctcacaaaacaaccataagttgatatttttgtgaatcgagtatttcagcaaaactactgcagtaagaa

SEQ ID NO: 3968 - DNA, 152 bp, synthetic construct
  source 1..152: mol_type = other DNA
aatgttgttgatgcaaccataaagtgatatttaccgactgtctgccatccgccgctgcaccgcagcccaaccatatattgatatctcacaaaacaaccataagttgatatttttgtgaatcgagtatttcagcaaaactactgcagtaagaa

SEQ ID NO: 3969 - DNA, 152 bp, synthetic construct
  source 1..152: mol_type = other DNA
aatgttgttgatgcaaccataaagtgatatttaccgactgcctgccatccgccgccgcaccgcagcccaaccatatattgatatctcacaaaacaaccataagttgatatttttgtgaatcgagtatttcagcaaaactactgcagtaagaa

SEQ ID NO: 3970 - DNA, 152 bp, synthetic construct
  source 1..152: mol_type = other DNA
aatgttgttgatgcaaccataaagtgatatttatattctaaatgttgattaatttgaatcatcatctcaaccatatattgatatctcacaaaacaaccataagttgatatttttgtgaatcgagtatttcagcaaaactactgcagtaagaa

SEQ ID NO: 3971 - DNA, 152 bp, synthetic construct
  source 1..152: mol_type = other DNA
aatgttgttgatgcaaccataaagtgatatttaagaattatgtcgttctaaacaagagatattagaacaaccatatattgatatctcacaaaacaaccataagttgatatttttgtgaatcgagtatttcagcaaaactactgcagtaagaa

SEQ ID NO: 3972 - DNA, 152 bp, synthetic construct
  source 1..152: mol_type = other DNA
aatgttgttgatgcaaccataaagtgatatttaacaagactaacattattagtaactgagaactatgcaaccatatattgatatctcacaaaacaaccataagttgatatttttgtgaatcgagtatttcagcaaaactactgcagtaagaa

SEQ ID NO: 3973 - DNA, 152 bp, synthetic construct
  source 1..152: mol_type = other DNA
aatgttgttgatgcaaccataaagtgatatttaactctcttctttagcagtctagtctattgaaactcaaccatatattgatatctcacaaaacaaccataagttgatatttttgtgaatcgagtatttcagcaaaactactgcagtaagaa

SEQ ID NO: 3974 - DNA, 152 bp, synthetic construct
  source 1..152: mol_type = other DNA
aatgttgttgatgcaaccataaagtgatatttaagctatactctaggtatctaacttgtcccattgccaaccatatattgatatctcacaaaacaaccataagttgatatttttgtgaatcgagtatttcagcaaaactactgcagtaagaa

SEQ ID NO: 3975 - DNA, 152 bp, synthetic construct
  source 1..152: mol_type = other DNA
aatgttgttgatgcaaccataaagtgatatttactaggattcatgtcaacgtgcaagcttagttcgacaaccatatattgatatctcacaaaacaaccataagttgatatttttgtgaatcgagtatttcagcaaaactactgcagtaagaa

SEQ ID NO: 3976 - DNA, 152 bp, synthetic construct
  source 1..152: mol_type = other DNA
aatgttgttgatgcaaccataaagtgatatttacttaagcgagtctgtcctttctgactgtcgatcccaaccatatattgatatctcacaaaacaaccataagttgatatttttgtgaatcgagtatttcagcaaaactactgcagtaagaa

SEQ ID NO: 3977 - DNA, 152 bp, synthetic construct
  source 1..152: mol_type = other DNA
aatgttgttgatgcaaccataaagtgatatttagacgtccttaactctggcagggagttcaagggaccaaccatatattgatatctcacaaaacaaccataagttgatatttttgtgaatcgagtatttcagcaaaactactgcagtaagaa

SEQ ID NO: 3978 - DNA, 152 bp, synthetic construct
  source 1..152: mol_type = other DNA
aatgttgttgatgcaaccataaagtgatatttacgtctgtacagcgcacagaagctgggaactcggccaaccatatattgatatctcacaaaacaaccataagttgatatttttgtgaatcgagtatttcagcaaaactactgcagtaagaa

SEQ ID NO: 3979 - DNA, 152 bp, synthetic construct
  source 1..152: mol_type = other DNA
aatgttgttgatgcaaccataaagtgatatttacacgaagtggcaactgccgtgctggcgtgcgatgcaaccatatattgatatctcacaaaacaaccataagttgatatttttgtgaatcgagtatttcagcaaaactactgcagtaagaa

SEQ ID NO: 3980 - DNA, 152 bp, synthetic construct
  source 1..152: mol_type = other DNA
aatgttgttgatgcaaccataaagtgatatttacgcactccgtagccatctggggcaccggacgctccaaccatatattgatatctcacaaaacaaccataagttgatatttttgtgaatcgagtatttcagcaaaactactgcagtaagaa

SEQ ID NO: 3981 - DNA, 152 bp, synthetic construct
  source 1..152: mol_type = other DNA
aatgttgttgatgcaaccataaagtgatatttagccgcttccggggctgccctctaagcgcgagcgccaaccatatattgatatctcacaaaacaaccataagttgatatttttgtgaatcgagtatttcagcaaaactactgcagtaagaa

SEQ ID NO: 3982 - DNA, 152 bp, synthetic construct
  source 1..152: mol_type = other DNA
aatgttgttgatgcaaccataaagtgatatttacgagccgagctcgtgcccggtgccgcggcagacgcaaccatatattgatatctcacaaaacaaccataagttgatatttttgtgaatcgagtatttcagcaaaactactgcagtaagaa

SEQ ID NO: 3983 - DNA, 152 bp, synthetic construct
  source 1..152: mol_type = other DNA
aatgttgttgatgcaaccataaagtgatatttattgtgagcggataacaagcaacttaaccacaaaacaaccatatattgatatctcacaaaacaaccataagttgatatttttgtgaatcgagtatttcagcaaaactactgcagtaagaa

SEQ ID NO: 3984 - DNA, 152 bp, synthetic construct
  source 1..152: mol_type = other DNA
aatgttgttgatgcaaccataaagtgatatttaataattgtgagcggataacaacttaaccacaaaacaaccatatattgatatctcacaaaacaaccataagttgatatttttgtgaatcgagtatttcagcaaaactactgcagtaagaa

SEQ ID NO: 3985 - DNA, 152 bp, synthetic construct
  source 1..152: mol_type = other DNA
aatgttgttgatgcaaccataaagtgatatttaataattatttgtgagcggataacaaaccacaaaacaaccatatattgatatctcacaaaacaaccataagttgatatttttgtgaatcgagtatttcagcaaaactactgcagtaagaa

SEQ ID NO: 3986 - DNA, 152 bp, synthetic construct
  source 1..152: mol_type = other DNA
aatgttgttgatgcaaccataaagtgatatttaataattatttatttgtgagcggataacaacaaaacaaccatatattgatatctcacaaaacaaccataagttgatatttttgtgaatcgagtatttcagcaaaactactgcagtaagaa

SEQ ID NO: 3987 - DNA, 152 bp, synthetic construct
  source 1..152: mol_type = other DNA
aatgttgttgatgcaaccataaagtgatatttaataattatttataatcattgtgagcggataacaacaaccatatattgatatctcacaaaacaaccataagttgatatttttgtgaatcgagtatttcagcaaaactactgcagtaagaa

SEQ ID NO: 3988 - DNA, 152 bp, synthetic construct
  source 1..152: mol_type = other DNA
aatgttgttgatgcaaccataaagtgatatttattgtgagcggataacaattgtgagcggataacaacaaccatatattgatatctcacaaaacaaccataagttgatatttttgtgaatcgagtatttcagcaaaactactgcagtaagaa

SEQ ID NO: 3989 - DNA, 152 bp, synthetic construct
  source 1..152: mol_type = other DNA
aatgttgttgatgcaaccataaagtgatatttaaattgtgagcggataacaattcttaaccacaaaacaaccatatattgatatctcacaaaacaaccataagttgatatttttgtgaatcgagtatttcagcaaaactactgcagtaagaa

SEQ ID NO: 3990 - DNA, 152 bp, synthetic construct
  source 1..152: mol_type = other DNA
aatgttgttgatgcaaccataaagtgatatttaataattaattgtgagcggataacaattcacaaaacaaccatatattgatatctcacaaaacaaccataagttgatatttttgtgaatcgagtatttcagcaaaactactgcagtaagaa

SEQ ID NO: 3991 - DNA, 152 bp, synthetic construct
  source 1..152: mol_type = other DNA
aatgttgttgatgcaaccataaagtgatatttaataattatttataaattgtgagcggataacaattcaaccatatattgatatctcacaaaacaaccataagttgatatttttgtgaatcgagtatttcagcaaaactactgcagtaagaa

SEQ ID NO: 3992 - DNA, 152 bp, synthetic construct
  source 1..152: mol_type = other DNA
aatgttgttgatgcaaccataaagtgatatttaaaatgtgagcgagtaacaacccttaaccacaaaacaaccatatattgatatctcacaaaacaaccataagttgatatttttgtgaatcgagtatttcagcaaaactactgcagtaagaa

SEQ ID NO: 3993 - DNA, 152 bp, synthetic construct
  source 1..152: mol_type = other DNA
aatgttgttgatgcaaccataaagtgatatttaataattaaatgtgagcgagtaacaacccacaaaacaaccatatattgatatctcacaaaacaaccataagttgatatttttgtgaatcgagtatttcagcaaaactactgcagtaagaa

SEQ ID NO: 3994 - DNA, 152 bp, synthetic construct
  source 1..152: mol_type = other DNA
aatgttgttgatgcaaccataaagtgatatttaataattatttataaaatgtgagcgagtaacaacccaaccatatattgatatctcacaaaacaaccataagttgatatttttgtgaatcgagtatttcagcaaaactactgcagtaagaa

SEQ ID NO: 3995 - DNA, 152 bp, synthetic construct
  source 1..152: mol_type = other DNA
aatgttgttgatgcaaccataaagtgatatttaggcagtgagcgcaacgcaattcttaaccacaaaacaaccatatattgatatctcacaaaacaaccataagttgatatttttgtgaatcgagtatttcagcaaaactactgcagtaagaa

SEQ ID NO: 3996 - DNA, 152 bp, synthetic construct
  source 1..152: mol_type = other DNA
aatgttgttgatgcaaccataaagtgatatttaataattggcagtgagcgcaacgcaattcacaaaacaaccatatattgatatctcacaaaacaaccataagttgatatttttgtgaatcgagtatttcagcaaaactactgcagtaagaa

SEQ ID NO: 3997 - DNA, 152 bp, synthetic construct
  source 1..152: mol_type = other DNA
aatgttgttgatgcaaccataaagtgatatttaataattatttataggcagtgagcgcaacgcaattcaaccatatattgatatctcacaaaacaaccataagttgatatttttgtgaatcgagtatttcagcaaaactactgcagtaagaa

SEQ ID NO: 3998 - DNA, 152 bp, synthetic construct
  source 1..152: mol_type = other DNA
aatgttgttgatgcaaccataaagtgatatttaagtactgcgcgtctgaagtcatctttaaaccgaacaaccatatattgatatctcacaaaacaaccataagttgatatttttgtgaatcgagtatttcagcaaaactactgcagtaagaa

SEQ ID NO: 3999 - DNA, 152 bp, synthetic construct
  source 1..152: mol_type = other DNA
aatgttgttgatgcaaccataaagtgatatttaaagtacagcgcgactgaactcatcattaaaacgacaaccatatattgatatctcacaaaacaaccataagttgatatttttgtgaatcgagtatttcagcaaaactactgcagtaagaa

SEQ ID NO: 4000 - DNA, 152 bp, synthetic construct
  source 1..152: mol_type = other DNA
aatgttgttgatgcaaccataaagtgatatttaatagtactgcgcgactgaaatcatcattaaaacgcaaccatatattgatatctcacaaaacaaccataagttgatatttttgtgaatcgagtatttcagcaaaactactgcagtaagaa

SEQ ID NO: 4001 - DNA, 152 bp, synthetic construct
  source 1..152: mol_type = other DNA
aatgttgttgatgcaaccataaagtgatatttatttatggctagctcagtcctaggtacaatgctagcaaccatatattgatatctcacaaaacaaccataagttgatatttttgtgaatcgagtatttcagcaaaactactgcagtaagaa

SEQ ID NO: 4002 - DNA, 152 bp, synthetic construct
  source 1..152: mol_type = other DNA
aatgttgttgatgcaaccataaagtgatatttattgacggctagctcagtcctaggtatagtgctagcaaccatatattgatatctcacaaaacaaccataagttgatatttttgtgaatcgagtatttcagcaaaactactgcagtaagaa

SEQ ID NO: 4003 - DNA, 152 bp, synthetic construct
  source 1..152: mol_type = other DNA
aatgttgttgatgcaaccataaagtgatatttattgacagctagctcagtcctaggtataatgctagcaaccatatattgatatctcacaaaacaaccataagttgatatttttgtgaatcgagtatttcagcaaaactactgcagtaagaa

SEQ ID NO: 4004 - DNA, 152 bp, synthetic construct
  source 1..152: mol_type = other DNA
aatgttgttgatgcaaccataaagtgatatttgctagcattgtacctaggactgagctagccataaacaaccatatattgatatctcacaaaacaaccataagttgatatttttgtgaatcgagtatttcagcaaaactactgcagtaagaa

SEQ ID NO: 4005 - DNA, 152 bp, synthetic construct
  source 1..152: mol_type = other DNA
aatgttgttgatgcaaccataaagtgatatttgctagcactatacctaggactgagctagccgtcaacaaccatatattgatatctcacaaaacaaccataagttgatatttttgtgaatcgagtatttcagcaaaactactgcagtaagaa

SEQ ID NO: 4006 - DNA, 152 bp, synthetic construct
  source 1..152: mol_type = other DNA
aatgttgttgatgcaaccataaagtgatatttgctagcattatacctaggactgagctagctgtcaacaaccatatattgatatctcacaaaacaaccataagttgatatttttgtgaatcgagtatttcagcaaaactactgcagtaagaa

SEQ ID NO: 4007 - DNA, 152 bp, synthetic construct
  source 1..152: mol_type = other DNA
aatgttgttgatgcaaccataaagtgatatttaataacttcgtatagcatacattatacgaagttatcaaccatatattgatatctcacaaaacaaccataagttgatatttttgtgaatcgagtatttcagcaaaactactgcagtaagaa

SEQ ID NO: 4008 - DNA, 152 bp, synthetic construct
  source 1..152: mol_type = other DNA
aatgttgttgatgcaaccataaagtgatatttaataacttcgtatagtataccttatacgaagttatcaaccatatattgatatctcacaaaacaaccataagttgatatttttgtgaatcgagtatttcagcaaaactactgcagtaagaa

SEQ ID NO: 4009 - DNA, 152 bp, synthetic construct
  source 1..152: mol_type = other DNA
aatgttgttgatgcaaccataaagtgatatttaataacttcgtataggatactttatacgaagttatcaaccatatattgatatctcacaaaacaaccataagttgatatttttgtgaatcgagtatttcagcaaaactactgcagtaagaa

SEQ ID NO: 4010 - DNA, 152 bp, synthetic construct
  source 1..152: mol_type = other DNA
aatgttgttgatgcaaccataaagtgatatttaataacttcgtatagtatacattatacgaagttatcaaccatatattgatatctcacaaaacaaccataagttgatatttttgtgaatcgagtatttcagcaaaactactgcagtaagaa

SEQ ID NO: 4011 - DNA, 152 bp, synthetic construct
  source 1..152: mol_type = other DNA
aatgttgttgatgcaaccataaagtgatatttaataacttggtatagcatacattatacgaacggtacaaccatatattgatatctcacaaaacaaccataagttgatatttttgtgaatcgagtatttcagcaaaactactgcagtaagaa

SEQ ID NO: 4012 - DNA, 152 bp, synthetic construct
  source 1..152: mol_type = other DNA
aatgttgttgatgcaaccataaagtgatatttataccgttcgtatacgatacattatacgaagttatcaaccatatattgatatctcacaaaacaaccataagttgatatttttgtgaatcgagtatttcagcaaaactactgcagtaagaa

SEQ ID NO: 4013 - DNA, 152 bp, synthetic construct
  source 1..152: mol_type = other DNA
aatgttgttgatgcaaccataaagtgatatttaataacttcgtataatgtatgctatacgaagttatcaaccatatattgatatctcacaaaacaaccataagttgatatttttgtgaatcgagtatttcagcaaaactactgcagtaagaa

SEQ ID NO: 4014 - DNA, 152 bp, synthetic construct
  source 1..152: mol_type = other DNA
aatgttgttgatgcaaccataaagtgatatttaataacttcgtataaggtatactatacgaagttatcaaccatatattgatatctcacaaaacaaccataagttgatatttttgtgaatcgagtatttcagcaaaactactgcagtaagaa

SEQ ID NO: 4015 - DNA, 152 bp, synthetic construct
  source 1..152: mol_type = other DNA
aatgttgttgatgcaaccataaagtgatatttaataacttcgtataaagtatcctatacgaagttatcaaccatatattgatatctcacaaaacaaccataagttgatatttttgtgaatcgagtatttcagcaaaactactgcagtaagaa

SEQ ID NO: 4016 - DNA, 152 bp, synthetic construct
  source 1..152: mol_type = other DNA
aatgttgttgatgcaaccataaagtgatatttaataacttcgtataatgtatactatacgaagttatcaaccatatattgatatctcacaaaacaaccataagttgatatttttgtgaatcgagtatttcagcaaaactactgcagtaagaa

SEQ ID NO: 4017 - DNA, 152 bp, synthetic construct
  source 1..152: mol_type = other DNA
aatgttgttgatgcaaccataaagtgatatttataccgttcgtataatgtatgctataccaagttatcaaccatatattgatatctcacaaaacaaccataagttgatatttttgtgaatcgagtatttcagcaaaactactgcagtaagaa

SEQ ID NO: 4018 - DNA, 152 bp, synthetic construct
  source 1..152: mol_type = other DNA
aatgttgttgatgcaaccataaagtgatatttaataacttcgtataatgtatcgtatacgaacggtacaaccatatattgatatctcacaaaacaaccataagttgatatttttgtgaatcgagtatttcagcaaaactactgcagtaagaa

SEQ ID NO: 4019 - DNA, 152 bp, synthetic construct
  source 1..152: mol_type = other DNA
aatgttgttgatgcaaccataaagtgatatttaataatggaattgtgagcggataacaattacaaaacaaccatatattgatatctcacaaaacaaccataagttgatatttttgtgaatcgagtatttcagcaaaactactgcagtaagaa

SEQ ID NO: 4020 - DNA, 152 bp, synthetic construct
  source 1..152: mol_type = other DNA
aatgttgttgatgcaaccataaagtgatatttaataattattgctgaagcgagacaccaccacaaaacaaccatatattgatatctcacaaaacaaccataagttgatatttttgtgaatcgagtatttcagcaaaactactgcagtaagaa

SEQ ID NO: 4021 - DNA, 152 bp, synthetic construct
  source 1..152: mol_type = other DNA
aatgttgttgatgcaaccataaagtgatatttaataaatatataaattaattattaaatccacaaaacaaccatatattgatatctcacaaaacaaccataagttgatatttttgtgaatcgagtatttcagcaaaactactgcagtaagaa

SEQ ID NO: 4022 - DNA, 152 bp, synthetic construct
  source 1..152: mol_type = other DNA
aatgttgttgatgcaaccataaagtgatatttaataattatttacttttggttacatattcacaaaacaaccatatattgatatctcacaaaacaaccataagttgatatttttgtgaatcgagtatttcagcaaaactactgcagtaagaa

SEQ ID NO: 4023 - DNA, 152 bp, synthetic construct
  source 1..152: mol_type = other DNA
aatgttgttgatgcaaccataaagtgatatttaataatctgtgattgttatcacattaaccacaaaacaaccatatattgatatctcacaaaacaaccataagttgatatttttgtgaatcgagtatttcagcaaaactactgcagtaagaa

SEQ ID NO: 4024 - DNA, 152 bp, synthetic construct
  source 1..152: mol_type = other DNA
aatgttgttgatgcaaccataaagtgatatttaataattatttataatgatgaatttttatgcaaaacaaccatatattgatatctcacaaaacaaccataagttgatatttttgtgaatcgagtatttcagcaaaactactgcagtaagaa

SEQ ID NO: 4025 - DNA, 152 bp, synthetic construct
  source 1..152: mol_type = other DNA
aatgttgttgatgcaaccataaagtgatatttaataatcaactgtatataaatacagttccacaaaacaaccatatattgatatctcacaaaacaaccataagttgatatttttgtgaatcgagtatttcagcaaaactactgcagtaagaa

SEQ ID NO: 4026 - DNA, 152 bp, synthetic construct
  source 1..152: mol_type = other DNA
aatgttgttgatgcaaccataaagtgatatttaataatgcgtactagttaactagttcgacacaaaacaaccatatattgatatctcacaaaacaaccataagttgatatttttgtgaatcgagtatttcagcaaaactactgcagtaagaa

SEQ ID NO: 4027 - DNA, 152 bp, synthetic construct
  source 1..152: mol_type = other DNA
aatgttgttgatgcaaccataaagtgatatttaataattaattgttatccgctcacaattcccaaaacaaccatatattgatatctcacaaaacaaccataagttgatatttttgtgaatcgagtatttcagcaaaactactgcagtaagaa

SEQ ID NO: 4028 - DNA, 152 bp, synthetic construct
  source 1..152: mol_type = other DNA
aatgttgttgatgcaaccataaagtgatatttaataattatttatggtgtctcgcttcagcacaaaacaaccatatattgatatctcacaaaacaaccataagttgatatttttgtgaatcgagtatttcagcaaaactactgcagtaagaa

SEQ ID NO: 4029 - DNA, 152 bp, synthetic construct
  source 1..152: mol_type = other DNA
aatgttgttgatgcaaccataaagtgatatttaataattatatttaataattaatttatatatttaacaaccatatattgatatctcacaaaacaaccataagttgatatttttgtgaatcgagtatttcagcaaaactactgcagtaagaa

SEQ ID NO: 4030 - DNA, 152 bp, synthetic construct
  source 1..152: mol_type = other DNA
aatgttgttgatgcaaccataaagtgatatttaataattatttataatatgtaaccaaaagtaaaaacaaccatatattgatatctcacaaaacaaccataagttgatatttttgtgaatcgagtatttcagcaaaactactgcagtaagaa

SEQ ID NO: 4031 - DNA, 152 bp, synthetic construct
  source 1..152: mol_type = other DNA
aatgttgttgatgcaaccataaagtgatatttaataattatttataatgtgataacaatcacagaaacaaccatatattgatatctcacaaaacaaccataagttgatatttttgtgaatcgagtatttcagcaaaactactgcagtaagaa

SEQ ID NO: 4032 - DNA, 152 bp, synthetic construct
  source 1..152: mol_type = other DNA
aatgttgttgatgcaaccataaagtgatatttaataattatttgcataaaaattcatcaccacaaaacaaccatatattgatatctcacaaaacaaccataagttgatatttttgtgaatcgagtatttcagcaaaactactgcagtaagaa

SEQ ID NO: 4033 - DNA, 152 bp, synthetic construct
  source 1..152: mol_type = other DNA
aatgttgttgatgcaaccataaagtgatatttaataactgtatttatatacagttgtaaccacaaaacaaccatatattgatatctcacaaaacaaccataagttgatatttttgtgaatcgagtatttcagcaaaactactgcagtaagaa

SEQ ID NO: 4034 - DNA, 152 bp, synthetic construct
  source 1..152: mol_type = other DNA
aatgttgttgatgcaaccataaagtgatatttaataattatttcgaactagttaactagtacgcaaacaaccatatattgatatctcacaaaacaaccataagttgatatttttgtgaatcgagtatttcagcaaaactactgcagtaagaa

SEQ ID NO: 4035 - DNA, 152 bp, synthetic construct
  source 1..152: mol_type = other DNA
aatgttgttgatgcaaccataaagtgatatttatattaataaatattagtcgttgaattggtgttttcaaccatatattgatatctcacaaaacaaccataagttgatatttttgtgaatcgagtatttcagcaaaactactgcagtaagaa

SEQ ID NO: 4036 - DNA, 152 bp, synthetic construct
  source 1..152: mol_type = other DNA
aatgttgttgatgcaaccataaagtgatatttaataattatttataaagtcgttgaataccacaaaacaaccatatattgatatctcacaaaacaaccataagttgatatttttgtgaatcgagtatttcagcaaaactactgcagtaagaa

SEQ ID NO: 4037 - DNA, 152 bp, synthetic construct
  source 1..152: mol_type = other DNA
ttttgtgttgaaacaaccataaagtgataacaacgaatcaattaaaatcataggcttaatcgaaaaacaaccatatcttgatatcgcataaaacaaccataagttgatattttggtgaaaaggatattccaaccttcatagtttagtaagaa

SEQ ID NO: 4038 - DNA, 152 bp, synthetic construct
  source 1..152: mol_type = other DNA
aatgttgttgaaacaaccataaagtgataacaacgaatcaattaaaatcataggcttaatcgaaaaacaaccatatcttgatatcgcataaaacaaccataagttgatattttggtgaaaaggatattccaaccttcatagtttagtaagaa

SEQ ID NO: 4039 - DNA, 152 bp, synthetic construct
  source 1..152: mol_type = other DNA
ttttgtgttgatgcaaccataaagtgataacaacgaatcaattaaaatcataggcttaatcgaaaaacaaccatatcttgatatcgcataaaacaaccataagttgatattttggtgaaaaggatattccaaccttcatagtttagtaagaa

SEQ ID NO: 4040 - DNA, 152 bp, synthetic construct
  source 1..152: mol_type = other DNA
ttttgtgttgaaacaaccataaagtgatatttacgaatcaattaaaatcataggcttaatcgaaaaacaaccatatcttgatatcgcataaaacaaccataagttgatattttggtgaaaaggatattccaaccttcatagtttagtaagaa

SEQ ID NO: 4041 - DNA, 152 bp, synthetic construct
  source 1..152: mol_type = other DNA
ttttgtgttgaaacaaccataaagtgataacaaataattatttataatcagcaacttaaccacaaaacaaccatatcttgatatcgcataaaacaaccataagttgatattttggtgaaaaggatattccaaccttcatagtttagtaagaa

SEQ ID NO: 4042 - DNA, 152 bp, synthetic construct
  source 1..152: mol_type = other DNA
ttttgtgttgaaacaaccataaagtgataacaacgaatcaattaaaatcataggcttaatcgaaaaacaaccatatattgatatctcataaaacaaccataagttgatattttggtgaaaaggatattccaaccttcatagtttagtaagaa

SEQ ID NO: 4043 - DNA, 152 bp, synthetic construct
  source 1..152: mol_type = other DNA
ttttgtgttgaaacaaccataaagtgataacaacgaatcaattaaaatcataggcttaatcgaaaaacaaccatatcttgatatcgcacaaaacaaccataagttgatattttggtgaaaaggatattccaaccttcatagtttagtaagaa

SEQ ID NO: 4044 - DNA, 152 bp, synthetic construct
  source 1..152: mol_type = other DNA
ttttgtgttgaaacaaccataaagtgataacaacgaatcaattaaaatcataggcttaatcgaaaaacaaccatatcttgatatcgcataaaacaaccataagttgatatttttgtgaataggatattccaaccttcatagtttagtaagaa

SEQ ID NO: 4045 - DNA, 152 bp, synthetic construct
  source 1..152: mol_type = other DNA
ttttgtgttgaaacaaccataaagtgataacaacgaatcaattaaaatcataggcttaatcgaaaaacaaccatatcttgatatcgcataaaacaaccataagttgatattttggtgaaacgagtatttcagcaaaactactgcagtaagaa

SEQ ID NO: 4046 - DNA, 152 bp, synthetic construct
  source 1..152: mol_type = other DNA
ttttgtgttgatgcaaccataaagtgatatttaataattatttataatcagcaacttaaccacaaaacaaccatatattgatatctcacaaaacaaccataagttgatatttttgtgaatcgagtatttcagcaaaactactgcagtaagaa

SEQ ID NO: 4047 - DNA, 152 bp, synthetic construct
  source 1..152: mol_type = other DNA
aatgttgttgaaacaaccataaagtgatatttaataattatttataatcagcaacttaaccacaaaacaaccatatattgatatctcacaaaacaaccataagttgatatttttgtgaatcgagtatttcagcaaaactactgcagtaagaa

SEQ ID NO: 4048 - DNA, 152 bp, synthetic construct
  source 1..152: mol_type = other DNA
aatgttgttgatgcaaccataaagtgataacaaataattatttataatcagcaacttaaccacaaaacaaccatatattgatatctcacaaaacaaccataagttgatatttttgtgaatcgagtatttcagcaaaactactgcagtaagaa

SEQ ID NO: 4049 - DNA, 152 bp, synthetic construct
  source 1..152: mol_type = other DNA
aatgttgttgatgcaaccataaagtgatatttacgaatcaattaaaatcataggcttaatcgaaaaacaaccatatattgatatctcacaaaacaaccataagttgatatttttgtgaatcgagtatttcagcaaaactactgcagtaagaa

SEQ ID NO: 4050 - DNA, 152 bp, synthetic construct
  source 1..152: mol_type = other DNA
aatgttgttgatgcaaccataaagtgatatttaataattatttataatcagcaacttaaccacaaaacaaccatatcttgatatcgcacaaaacaaccataagttgatatttttgtgaatcgagtatttcagcaaaactactgcagtaagaa

SEQ ID NO: 4051 - DNA, 152 bp, synthetic construct
  source 1..152: mol_type = other DNA
aatgttgttgatgcaaccataaagtgatatttaataattatttataatcagcaacttaaccacaaaacaaccatatattgatatctcacaaaacaaccataagttgatattttggtgaaacgagtatttcagcaaaactactgcagtaagaa

SEQ ID NO: 4052 - DNA, 152 bp, synthetic construct
  source 1..152: mol_type = other DNA
aatgttgttgatgcaaccataaagtgatatttaataattatttataatcagcaacttaaccacaaaacaaccatatattgatatctcacaaaacaaccataagttgatatttttgtgaataggatattccaaccttcatagtttagtaagaa

SEQ ID NO: 4053 - DNA, 152 bp, synthetic construct
  source 1..152: mol_type = other DNA
aatgttgttgatgcaaccataaagtgataacaaataattatttataatcagcaacttaaccacaaaacaaccatatcttgatatcgcacaaaacaaccataagttgatatttttgtgaatcgagtatttcagcaaaactactgcagtaagaa

SEQ ID NO: 4054 - DNA, 152 bp, synthetic construct
  source 1..152: mol_type = other DNA
aatgttgttgatgcaaccataaagtgatatttacgaatcaattaaaatcataggcttaatcgaaaaacaaccatatattgatatctcataaaacaaccataagttgatattttggtgaaaaggatattccaaccttcatagtttagtaagaa

SEQ ID NO: 4055 - DNA, 152 bp, synthetic construct
  source 1..152: mol_type = other DNA
aatgttgttgaaacaaccataaagtgataacaacgaatcaattaaaatcataggcttaatcgaaaaacaaccatatcttgatatcgcataaaacaaccataagttgatattttggtgaaacgagtatttcagcaaaactactgcagtaagaa

SEQ ID NO: 4056 - DNA, 152 bp, synthetic construct
  source 1..152: mol_type = other DNA
aatgttgttgaaacaaccataaagtgataacaacgaatcaattaaaatcataggcttaatcgaaaaacaaccatatcttgatatcgcataaaacaaccataagttgatatttttgtgaatcgagtatttcagcaaaactactgcagtaagaa

SEQ ID NO: 4057 - DNA, 152 bp, synthetic construct
  source 1..152: mol_type = other DNA
aatgttgttgaaacaaccataaagtgataacaacgaatcaattaaaatcataggcttaatcgaaaaacaaccatatcttgatatcgcacaaaacaaccataagttgatatttttgtgaatcgagtatttcagcaaaactactgcagtaagaa

SEQ ID NO: 4058 - DNA, 152 bp, synthetic construct
  source 1..152: mol_type = other DNA
aatgttgttgaaacaaccataaagtgataacaaataattatttataatcagcaacttaaccacaaaacaaccatatcttgatatcgcacaaaacaaccataagttgatatttttgtgaatcgagtatttcagcaaaactactgcagtaagaa

SEQ ID NO: 4059 - DNA, 152 bp, synthetic construct
  source 1..152: mol_type = other DNA
aatgttgttgatacaaccataaagtgataacaaataattatttataatcagcaacttaaccacaaaacaaccatatcttgatatcgcacaaaacaaccataagttgatatttttgtgaatcgagtatttcagcaaaactactgcagtaagaa

SEQ ID NO: 4060 - DNA, 152 bp, synthetic construct
  source 1..152: mol_type = other DNA
aatgttgttgaagcaaccataaagtgataacaaataattatttataatcagcaacttaaccacaaaacaaccatatcttgatatcgcacaaaacaaccataagttgatatttttgtgaatcgagtatttcagcaaaactactgcagtaagaa

SEQ ID NO: 4061 - DNA, 152 bp, synthetic construct
  source 1..152: mol_type = other DNA
aatgttgttgaaacaaccataaagtgatatcaaataattatttataatcagcaacttaaccacaaaacaaccatatcttgatatcgcacaaaacaaccataagttgatatttttgtgaatcgagtatttcagcaaaactactgcagtaagaa

SEQ ID NO: 4062 - DNA, 152 bp, synthetic construct
  source 1..152: mol_type = other DNA
aatgttgttgaaacaaccataaagtgataataaataattatttataatcagcaacttaaccacaaaacaaccatatcttgatatcgcacaaaacaaccataagttgatatttttgtgaatcgagtatttcagcaaaactactgcagtaagaa

SEQ ID NO: 4063 - DNA, 152 bp, synthetic construct
  source 1..152: mol_type = other DNA
aatgttgttgaaacaaccataaagtgataactaataattatttataatcagcaacttaaccacaaaacaaccatatcttgatatcgcacaaaacaaccataagttgatatttttgtgaatcgagtatttcagcaaaactactgcagtaagaa

SEQ ID NO: 4064 - DNA, 152 bp, synthetic construct
  source 1..152: mol_type = other DNA
aatgttgttgaaacaaccataaagtgatattaaataattatttataatcagcaacttaaccacaaaacaaccatatcttgatatcgcacaaaacaaccataagttgatatttttgtgaatcgagtatttcagcaaaactactgcagtaagaa

SEQ ID NO: 4065 - DNA, 152 bp, synthetic construct
  source 1..152: mol_type = other DNA
aatgttgttgaaacaaccataaagtgataattaataattatttataatcagcaacttaaccacaaaacaaccatatcttgatatcgcacaaaacaaccataagttgatatttttgtgaatcgagtatttcagcaaaactactgcagtaagaa

SEQ ID NO: 4066 - DNA, 152 bp, synthetic construct
  source 1..152: mol_type = other DNA
aatgttgttgaaacaaccataaagtgatatctaataattatttataatcagcaacttaaccacaaaacaaccatatcttgatatcgcacaaaacaaccataagttgatatttttgtgaatcgagtatttcagcaaaactactgcagtaagaa

SEQ ID NO: 4067 - DNA, 152 bp, synthetic construct
  source 1..152: mol_type = other DNA
aatgttgttgaaacaaccataaagtgatatttaataattatttataatcagcaacttaaccacaaaacaaccatatcttgatatcgcacaaaacaaccataagttgatatttttgtgaatcgagtatttcagcaaaactactgcagtaagaa

SEQ ID NO: 4068 - DNA, 152 bp, synthetic construct
  source 1..152: mol_type = other DNA
aatgttgttgaaacaaccataaagtgataacaaataattatttataatcagcaacttaaccacaaaacaaccatatattgatatcgcacaaaacaaccataagttgatatttttgtgaatcgagtatttcagcaaaactactgcagtaagaa

SEQ ID NO: 4069 - DNA, 152 bp, synthetic construct
  source 1..152: mol_type = other DNA
aatgttgttgaaacaaccataaagtgataacaaataattatttataatcagcaacttaaccacaaaacaaccatatcttgatatctcacaaaacaaccataagttgatatttttgtgaatcgagtatttcagcaaaactactgcagtaagaa

SEQ ID NO: 4070 - DNA, 152 bp, synthetic construct
  source 1..152: mol_type = other DNA
aatgttgttgaaacaaccataaagtgataacaaataattatttataatcagcaacttaaccacaaaacaaccatatattgatatctcacaaaacaaccataagttgatatttttgtgaatcgagtatttcagcaaaactactgcagtaagaa

SEQ ID NO: 4071 - DNA, 152 bp, synthetic construct
  source 1..152: mol_type = other DNA
aatgttgttgatgcaaccataaagtgataactaataattatttataatcagcaacttaaccacaaaacaaccatatcttgatatctcacaaaacaaccataagttgatatttttgtgaatcgagtatttcagcaaaactactgcagtaagaa

SEQ ID NO: 4072 - DNA, 152 bp, synthetic construct
  source 1..152: mol_type = other DNA
aatgttgttgatgcaaccataaagtgatattaaataattatttataatcagcaacttaaccacaaaacaaccatatcttgatatcgcacaaaacaaccataagttgatatttttgtgaatcgagtatttcagcaaaactactgcagtaagaa

SEQ ID NO: 4073 - DNA, 152 bp, synthetic construct
  source 1..152: mol_type = other DNA
aatgttgttgatgaaaccataaagtgatatttaataattatttataatcagcaacttaaccacaaaaaaaccatatattgatatctcacaaaaaaaccataagttgatatttttgtgaatcgagtatttcagcaaaactactgcagtaagaa

SEQ ID NO: 4074 - DNA, 152 bp, synthetic construct
  source 1..152: mol_type = other DNA
aatgttgttgatgccaccataaagtgatatttaataattatttataatcagcaacttaaccacaaaaccaccatatattgatatctcacaaaaccaccataagttgatatttttgtgaatcgagtatttcagcaaaactactgcagtaagaa

SEQ ID NO: 4075 - DNA, 152 bp, synthetic construct
  source 1..152: mol_type = other DNA
aatgttgttgatgcacccataaagtgatatttaataattatttataatcagcaacttaaccacaaaacacccatatattgatatctcacaaaacacccataagttgatatttttgtgaatcgagtatttcagcaaaactactgcagtaagaa

SEQ ID NO: 4076 - DNA, 152 bp, synthetic construct
  source 1..152: mol_type = other DNA
aatgttgttgatgcaaacataaagtgatatttaataattatttataatcagcaacttaaccacaaaacaaacatatattgatatctcacaaaacaaacataagttgatatttttgtgaatcgagtatttcagcaaaactactgcagtaagaa

SEQ ID NO: 4077 - DNA, 152 bp, synthetic construct
  source 1..152: mol_type = other DNA
aatgttgttgatgcaacaataaagtgatatttaataattatttataatcagcaacttaaccacaaaacaacaatatattgatatctcacaaaacaacaataagttgatatttttgtgaatcgagtatttcagcaaaactactgcagtaagaa

SEQ ID NO: 4078 - DNA, 152 bp, synthetic construct
  source 1..152: mol_type = other DNA
aatgttgttgatgcaaccctaaagtgatatttaataattatttataatcagcaacttaaccacaaaacaaccctatattgatatctcacaaaacaaccctaagttgatatttttgtgaatcgagtatttcagcaaaactactgcagtaagaa

SEQ ID NO: 4079 - DNA, 152 bp, synthetic construct
  source 1..152: mol_type = other DNA
aatgttgttgatgcaaccagaaagtgatatttaataattatttataatcagcaacttaaccacaaaacaaccagatattgatatctcacaaaacaaccagaagttgatatttttgtgaatcgagtatttcagcaaaactactgcagtaagaa

SEQ ID NO: 4080 - DNA, 152 bp, synthetic construct
  source 1..152: mol_type = other DNA
aatgttgttgatgcaaccatcaagtgatatttaataattatttataatcagcaacttaaccacaaaacaaccatctattgatatctcacaaaacaaccatcagttgatatttttgtgaatcgagtatttcagcaaaactactgcagtaagaa

SEQ ID NO: 4081 - DNA, 152 bp, synthetic construct
  source 1..152: mol_type = other DNA
aatgttgttgatgcaaccatacagtgatatttaataattatttataatcagcaacttaaccacaaaacaaccatagattgatatctcacaaaacaaccatacgttgatatttttgtgaatcgagtatttcagcaaaactactgcagtaagaa

SEQ ID NO: 4082 - DNA, 152 bp, synthetic construct
  source 1..152: mol_type = other DNA
aatgttgttgatgcaaccataacgtgatatttaataattatttataatcagcaacttaaccacaaaacaaccatatcttgatatctcacaaaacaaccataatttgatatttttgtgaatcgagtatttcagcaaaactactgcagtaagaa

SEQ ID NO: 4083 - DNA, 152 bp, synthetic construct
  source 1..152: mol_type = other DNA
aatgttgttgatgcaaccataaattgatatttaataattatttataatcagcaacttaaccacaaaacaaccatatagtgatatctcacaaaacaaccataaggtgatatttttgtgaatcgagtatttcagcaaaactactgcagtaagaa

SEQ ID NO: 4084 - DNA, 152 bp, synthetic construct
  source 1..152: mol_type = other DNA
aatgttgttgatgcaaccataaagggatatttaataattatttataatcagcaacttaaccacaaaacaaccatatatggatatctcacaaaacaaccataagtggatatttttgtgaatcgagtatttcagcaaaactactgcagtaagaa

SEQ ID NO: 4085 - DNA, 152 bp, synthetic construct
  source 1..152: mol_type = other DNA
aatgttgttgatgcaaccataaagttatatttaataattatttataatcagcaacttaaccacaaaacaaccatatatttatatctcacaaaacaaccataagtttatatttttgtgaatcgagtatttcagcaaaactactgcagtaagaa

SEQ ID NO: 4086 - DNA, 152 bp, synthetic construct
  source 1..152: mol_type = other DNA
aatgttgttgatgcaaccataaagtgctatttaataattatttataatcagcaacttaaccacaaaacaaccatatattgctatctcacaaaacaaccataagttgctatttttgtgaatcgagtatttcagcaaaactactgcagtaagaa

SEQ ID NO: 4087 - DNA, 152 bp, synthetic construct
  source 1..152: mol_type = other DNA
aatgttgttgatgcaaccataaagtgagatttaataattatttataatcagcaacttaaccacaaaacaaccatatattgagatctcacaaaacaaccataagttgagatttttgtgaatcgagtatttcagcaaaactactgcagtaagaa

SEQ ID NO: 4088 - DNA, 152 bp, synthetic construct
  source 1..152: mol_type = other DNA
aatgttgttgatgcaaccataaagtgatctttaataattatttataatcagcaacttaaccacaaaacaaccatatattgatctctcacaaaacaaccataagttgatctttttgtgaatcgagtatttcagcaaaactactgcagtaagaa

SEQ ID NO: 4089 - DNA, 152 bp, synthetic construct
  source 1..152: mol_type = other DNA
aatgttgttgatgcaaccataaagtgatagttaataattatttataatcagcaacttaaccacaaaacaaccatatattgatagctcacaaaacaaccataagttgatagttttgtgaatcgagtatttcagcaaaactactgcagtaagaa

SEQ ID NO: 4090 - DNA, 152 bp, synthetic construct
  source 1..152: mol_type = other DNA
aatgttgttgatgcaaccataaagtgatatgtaataattatttataatcagcaacttaaccacaaaacaaccatatattgatatatcacaaaacaaccataagttgatatgtttgtgaatcgagtatttcagcaaaactactgcagtaagaa

SEQ ID NO: 4091 - DNA, 152 bp, synthetic construct
  source 1..152: mol_type = other DNA
aatgttgttgatgcaaccataaagtgatattgaataattatttataatcagcaacttaaccacaaaacaaccatatattgatatcgcacaaaacaaccataagttgatattgttgtgaatcgagtatttcagcaaaactactgcagtaagaa

SEQ ID NO: 4092 - DNA, 152 bp, synthetic construct
  source 1..152: mol_type = other DNA
aatgttgttgatgcaaccataaagtgatatttcataattatttataatcagcaacttaaccacaaaacaaccatatattgatatctaacaaaacaaccataagttgatatttgtgtgaatcgagtatttcagcaaaactactgcagtaagaa

SEQ ID NO: 4093 - DNA, 152 bp, synthetic construct
  source 1..152: mol_type = other DNA
aatgttgttgatgcaaccataaagtgatattgcataattatttataatcagcaacttaaccacaaaacaaccatatattgatatcgaacaaaacaaccataagttgatattggtgtgaatcgagtatttcagcaaaactactgcagtaagaa

SEQ ID NO: 4094 - DNA, 152 bp, synthetic construct
  source 1..152: mol_type = other DNA
aatgttgttgatgcaaccataaagtgatatggcataattatttataatcagcaacttaaccacaaaacaaccatatattgatatagaacaaaacaaccataagttgatatgggtgtgaatcgagtatttcagcaaaactactgcagtaagaa

SEQ ID NO: 4095 - DNA, 152 bp, synthetic construct
  source 1..152: mol_type = other DNA
aatgttgttgatgcaaccataaagtgatagggcataattatttataatcagcaacttaaccacaaaacaaccatatattgatagagaacaaaacaaccataagttgataggggtgtgaatcgagtatttcagcaaaactactgcagtaagaa

SEQ ID NO: 4096 - DNA, 152 bp, synthetic construct
  source 1..152: mol_type = other DNA
aatgttgttgatgcaaccataaagtgatcgggcataattatttataatcagcaacttaaccacaaaacaaccatatattgatcgagaacaaaacaaccataagttgatcggggtgtgaatcgagtatttcagcaaaactactgcagtaagaa

SEQ ID NO: 4097 - DNA, 152 bp, synthetic construct
  source 1..152: mol_type = other DNA
aatgttgttgatgcaaccataaagtgagcgggcataattatttataatcagcaacttaaccacaaaacaaccatatattgagcgagaacaaaacaaccataagttgagcggggtgtgaatcgagtatttcagcaaaactactgcagtaagaa

SEQ ID NO: 4098 - DNA, 152 bp, synthetic construct
  source 1..152: mol_type = other DNA
aatgttgttgatgcaaccataaagtgcgcgggcataattatttataatcagcaacttaaccacaaaacaaccatatattgcgcgagaacaaaacaaccataagttgcgcggggtgtgaatcgagtatttcagcaaaactactgcagtaagaa

SEQ ID NO: 4099 - DNA, 152 bp, synthetic construct
  source 1..152: mol_type = other DNA
aatgttgttgatgcaaccataccgtgatatttaataattatttataatcagcaacttaaccacaaaacaaccatagcttgatatctcacaaaacaaccatactttgatatttttgtgaatcgagtatttcagcaaaactactgcagtaagaa

SEQ ID NO: 4100 - DNA, 152 bp, synthetic construct
  source 1..152: mol_type = other DNA
aatgttgttgatgcaaccataacttgatatttaataattatttataatcagcaacttaaccacaaaacaaccatatcgtgatatctcacaaaacaaccataatgtgatatttttgtgaatcgagtatttcagcaaaactactgcagtaagaa

SEQ ID NO: 4101 - DNA, 152 bp, synthetic construct
  source 1..152: mol_type = other DNA
aatgttgttgatgcaaccataccttgatatttaataattatttataatcagcaacttaaccacaaaacaaccatagcgtgatatctcacaaaacaaccatactgtgatatttttgtgaatcgagtatttcagcaaaactactgcagtaagaa

SEQ ID NO: 4102 - DNA, 152 bp, synthetic construct
  source 1..152: mol_type = other DNA
aatgttgttgatgcaaccatcccttgatatttaataattatttataatcagcaacttaaccacaaaacaaccatcgcgtgatatctcacaaaacaaccatcctgtgatatttttgtgaatcgagtatttcagcaaaactactgcagtaagaa

SEQ ID NO: 4103 - DNA, 152 bp, synthetic construct
  source 1..152: mol_type = other DNA
aatgttgttgatgcaaccatacctggatatttaataattatttataatcagcaacttaaccacaaaacaaccatagcgggatatctcacaaaacaaccatactgggatatttttgtgaatcgagtatttcagcaaaactactgcagtaagaa

SEQ ID NO: 4104 - DNA, 152 bp, synthetic construct
  source 1..152: mol_type = other DNA
aatgttgttgatgcaaccagcccttgatatttaataattatttataatcagcaacttaaccacaaaacaaccagcgcgtgatatctcacaaaacaaccagcctgtgatatttttgtgaatcgagtatttcagcaaaactactgcagtaagaa

SEQ ID NO: 4105 - DNA, 152 bp, synthetic construct
  source 1..152: mol_type = other DNA
aatgttgttgatgcaaccatacctgtatatttaataattatttataatcagcaacttaaccacaaaacaaccatagcggtatatctcacaaaacaaccatactggtatatttttgtgaatcgagtatttcagcaaaactactgcagtaagaa

SEQ ID NO: 4106 - DNA, 152 bp, synthetic construct
  source 1..152: mol_type = other DNA
aatgttgttgatggaaccataaagtgatatttaataattatttataatcagcaacttaaccacaaaagaaccatatattgatatctcacaaaagaaccataagttgatatttttgtgaatcgagtatttcagcaaaactactgcagtaagaa

SEQ ID NO: 4107 - DNA, 152 bp, synthetic construct
  source 1..152: mol_type = other DNA
aatgttgttgatgctaccataaagtgatatttaataattatttataatcagcaacttaaccacaaaactaccatatattgatatctcacaaaactaccataagttgatatttttgtgaatcgagtatttcagcaaaactactgcagtaagaa

SEQ ID NO: 4108 - DNA, 152 bp, synthetic construct
  source 1..152: mol_type = other DNA
aatgttgttgatgcatccataaagtgatatttaataattatttataatcagcaacttaaccacaaaacatccatatattgatatctcacaaaacatccataagttgatatttttgtgaatcgagtatttcagcaaaactactgcagtaagaa

SEQ ID NO: 4109 - DNA, 152 bp, synthetic construct
  source 1..152: mol_type = other DNA
aatgttgttgatgcaagcataaagtgatatttaataattatttataatcagcaacttaaccacaaaacaagcatatattgatatctcacaaaacaagcataagttgatatttttgtgaatcgagtatttcagcaaaactactgcagtaagaa

SEQ ID NO: 4110 - DNA, 152 bp, synthetic construct
  source 1..152: mol_type = other DNA
aatgttgttgatgcaacgataaagtgatatttaataattatttataatcagcaacttaaccacaaaacaacgatatattgatatctcacaaaacaacgataagttgatatttttgtgaatcgagtatttcagcaaaactactgcagtaagaa

SEQ ID NO: 4111 - DNA, 152 bp, synthetic construct
  source 1..152: mol_type = other DNA
aatgttgttgatgcaaccttaaagtgatatttaataattatttataatcagcaacttaaccacaaaacaaccttatattgatatctcacaaaacaaccttaagttgatatttttgtgaatcgagtatttcagcaaaactactgcagtaagaa

SEQ ID NO: 4112 - DNA, 152 bp, synthetic construct
  source 1..152: mol_type = other DNA
aatgttgttgatgcaaccaaaaagtgatatttaataattatttataatcagcaacttaaccacaaaacaaccaaatattgatatctcacaaaacaaccaaaagttgatatttttgtgaatcgagtatttcagcaaaactactgcagtaagaa

SEQ ID NO: 4113 - DNA, 152 bp, synthetic construct
  source 1..152: mol_type = other DNA
aatgttgttgatgcaaccattaagtgatatttaataattatttataatcagcaacttaaccacaaaacaaccatttattgatatctcacaaaacaaccattagttgatatttttgtgaatcgagtatttcagcaaaactactgcagtaagaa

SEQ ID NO: 4114 - DNA, 152 bp, synthetic construct
  source 1..152: mol_type = other DNA
aatgttgttgatgcaaccatatagtgatatttaataattatttataatcagcaacttaaccacaaaacaaccataaattgatatctcacaaaacaaccatatgttgatatttttgtgaatcgagtatttcagcaaaactactgcagtaagaa

SEQ ID NO: 4115 - DNA, 152 bp, synthetic construct
  source 1..152: mol_type = other DNA
aatgttgttgatgcaaccataatgtgatatttaataattatttataatcagcaacttaaccacaaaacaaccatattttgatatctcacaaaacaaccataacttgatatttttgtgaatcgagtatttcagcaaaactactgcagtaagaa

SEQ ID NO: 4116 - DNA, 152 bp, synthetic construct
  source 1..152: mol_type = other DNA
aatgttgttgatgcaaccataaactgatatttaataattatttataatcagcaacttaaccacaaaacaaccatataatgatatctcacaaaacaaccataagatgatatttttgtgaatcgagtatttcagcaaaactactgcagtaagaa

SEQ ID NO: 4117 - DNA, 152 bp, synthetic construct
  source 1..152: mol_type = other DNA
aatgttgttgatgcaaccataaagagatatttaataattatttataatcagcaacttaaccacaaaacaaccatatatagatatctcacaaaacaaccataagtagatatttttgtgaatcgagtatttcagcaaaactactgcagtaagaa

SEQ ID NO: 4118 - DNA, 152 bp, synthetic construct
  source 1..152: mol_type = other DNA
aatgttgttgatgcaaccataaagtcatatttaataattatttataatcagcaacttaaccacaaaacaaccatatattcatatctcacaaaacaaccataagttcatatttttgtgaatcgagtatttcagcaaaactactgcagtaagaa

SEQ ID NO: 4119 - DNA, 152 bp, synthetic construct
  source 1..152: mol_type = other DNA
aatgttgttgatgcaaccataaagtgttatttaataattatttataatcagcaacttaaccacaaaacaaccatatattgttatctcacaaaacaaccataagttgttatttttgtgaatcgagtatttcagcaaaactactgcagtaagaa

SEQ ID NO: 4120 - DNA, 152 bp, synthetic construct
  source 1..152: mol_type = other DNA
aatgttgttgatgcaaccataaagtgaaatttaataattatttataatcagcaacttaaccacaaaacaaccatatattgaaatctcacaaaacaaccataagttgaaatttttgtgaatcgagtatttcagcaaaactactgcagtaagaa

SEQ ID NO: 4121 - DNA, 152 bp, synthetic construct
  source 1..152: mol_type = other DNA
aatgttgttgatgcaaccataaagtgatttttaataattatttataatcagcaacttaaccacaaaacaaccatatattgatttctcacaaaacaaccataagttgatttttttgtgaatcgagtatttcagcaaaactactgcagtaagaa

SEQ ID NO: 4122 - DNA, 152 bp, synthetic construct
  source 1..152: mol_type = other DNA
aatgttgttgatgcaaccataaagtgataattaataattatttataatcagcaacttaaccacaaaacaaccatatattgataactcacaaaacaaccataagttgataattttgtgaatcgagtatttcagcaaaactactgcagtaagaa

SEQ ID NO: 4123 - DNA, 152 bp, synthetic construct
  source 1..152: mol_type = other DNA
aatgttgttgatgcaaccataaagtgatatataataattatttataatcagcaacttaaccacaaaacaaccatatattgatatgtcacaaaacaaccataagttgatatatttgtgaatcgagtatttcagcaaaactactgcagtaagaa

SEQ ID NO: 4124 - DNA, 152 bp, synthetic construct
  source 1..152: mol_type = other DNA
aatgttgttgatgcaaccataaagtgatattaaataattatttataatcagcaacttaaccacaaaacaaccatatattgatatcacacaaaacaaccataagttgatattattgtgaatcgagtatttcagcaaaactactgcagtaagaa

SEQ ID NO: 4125 - DNA, 152 bp, synthetic construct
  source 1..152: mol_type = other DNA
aatgttgttgatgcaaccataaagtgatattttataattatttataatcagcaacttaaccacaaaacaaccatatattgatatctgacaaaacaaccataagttgatatttatgtgaatcgagtatttcagcaaaactactgcagtaagaa

SEQ ID NO: 4126 - DNA, 152 bp, synthetic construct
  source 1..152: mol_type = other DNA
aatgttgttgatgcaaccataaagtgatattatataattatttataatcagcaacttaaccacaaaacaaccatatattgatatcagacaaaacaaccataagttgatattaatgtgaatcgagtatttcagcaaaactactgcagtaagaa

SEQ ID NO: 4127 - DNA, 152 bp, synthetic construct
  source 1..152: mol_type = other DNA
aatgttgttgatgcaaccataaagtgatataatataattatttataatcagcaacttaaccacaaaacaaccatatattgatatgagacaaaacaaccataagttgatataaatgtgaatcgagtatttcagcaaaactactgcagtaagaa

SEQ ID NO: 4128 - DNA, 152 bp, synthetic construct
  source 1..152: mol_type = other DNA
aatgttgttgatgcaaccataaagtgataaaatataattatttataatcagcaacttaaccacaaaacaaccatatattgataagagacaaaacaaccataagttgataaaaatgtgaatcgagtatttcagcaaaactactgcagtaagaa

SEQ ID NO: 4129 - DNA, 152 bp, synthetic construct
  source 1..152: mol_type = other DNA
aatgttgttgatgcaaccataaagtgattaaatataattatttataatcagcaacttaaccacaaaacaaccatatattgattagagacaaaacaaccataagttgattaaaatgtgaatcgagtatttcagcaaaactactgcagtaagaa

SEQ ID NO: 4130 - DNA, 152 bp, synthetic construct
  source 1..152: mol_type = other DNA
aatgttgttgatgcaaccataaagtgaataaatataattatttataatcagcaacttaaccacaaaacaaccatatattgaatagagacaaaacaaccataagttgaataaaatgtgaatcgagtatttcagcaaaactactgcagtaagaa

SEQ ID NO: 4131 - DNA, 152 bp, synthetic construct
  source 1..152: mol_type = other DNA
aatgttgttgatgcaaccataaagtgtataaatataattatttataatcagcaacttaaccacaaaacaaccatatattgtatagagacaaaacaaccataagttgtataaaatgtgaatcgagtatttcagcaaaactactgcagtaagaa

SEQ ID NO: 4132 - DNA, 152 bp, synthetic construct
  source 1..152: mol_type = other DNA
aatgttgttgatgcaaccatattgtgatatttaataattatttataatcagcaacttaaccacaaaacaaccataatttgatatctcacaaaacaaccatatcttgatatttttgtgaatcgagtatttcagcaaaactactgcagtaagaa

SEQ ID NO: 4133 - DNA, 152 bp, synthetic construct
  source 1..152: mol_type = other DNA
aatgttgttgatgcaaccataatctgatatttaataattatttataatcagcaacttaaccacaaaacaaccatattatgatatctcacaaaacaaccataacatgatatttttgtgaatcgagtatttcagcaaaactactgcagtaagaa

SEQ ID NO: 4134 - DNA, 152 bp, synthetic construct
  source 1..152: mol_type = other DNA
aatgttgttgatgcaaccatattctgatatttaataattatttataatcagcaacttaaccacaaaacaaccataatatgatatctcacaaaacaaccatatcatgatatttttgtgaatcgagtatttcagcaaaactactgcagtaagaa

SEQ ID NO: 4135 - DNA, 152 bp, synthetic construct
  source 1..152: mol_type = other DNA
aatgttgttgatgcaaccattttctgatatttaataattatttataatcagcaacttaaccacaaaacaaccattatatgatatctcacaaaacaaccatttcatgatatttttgtgaatcgagtatttcagcaaaactactgcagtaagaa

SEQ ID NO: 4136 - DNA, 152 bp, synthetic construct
  source 1..152: mol_type = other DNA
aatgttgttgatgcaaccatattcagatatttaataattatttataatcagcaacttaaccacaaaacaaccataataagatatctcacaaaacaaccatatcaagatatttttgtgaatcgagtatttcagcaaaactactgcagtaagaa

SEQ ID NO: 4137 - DNA, 152 bp, synthetic construct
  source 1..152: mol_type = other DNA
aatgttgttgatgcaaccaatttctgatatttaataattatttataatcagcaacttaaccacaaaacaaccaatatatgatatctcacaaaacaaccaattcatgatatttttgtgaatcgagtatttcagcaaaactactgcagtaagaa

SEQ ID NO: 4138 - DNA, 152 bp, synthetic construct
  source 1..152: mol_type = other DNA
aatgttgttgatgcaaccatattcacatatttaataattatttataatcagcaacttaaccacaaaacaaccataataacatatctcacaaaacaaccatatcaacatatttttgtgaatcgagtatttcagcaaaactactgcagtaagaa

SEQ ID NO: 4139 - DNA, 152 bp, synthetic construct
  source 1..152: mol_type = other DNA
aatgttgtcaaccataaagtgatatttaataattatttataatcagcaacttaaccacaaaacaaccatatattgatatctcacaaaacaaccataagttgatatttttgtgaatcgagtatttcagcaaaactactgcagtaagaaagtta

SEQ ID NO: 4140 - DNA, 152 bp, synthetic construct
  source 1..152: mol_type = other DNA
aatgttgttcaaccataaagtgatatttaataattatttataatcagcaacttaaccacaaaacaaccatatattgatatctcacaaaacaaccataagttgatatttttgtgaatcgagtatttcagcaaaactactgcagtaagaaagtt

SEQ ID NO: 4141 - DNA, 152 bp, synthetic construct
  source 1..152: mol_type = other DNA
aatgttgttgcaaccataaagtgatatttaataattatttataatcagcaacttaaccacaaaacaaccatatattgatatctcacaaaacaaccataagttgatatttttgtgaatcgagtatttcagcaaaactactgcagtaagaaagt

SEQ ID NO: 4142 - DNA, 152 bp, synthetic construct
  source 1..152: mol_type = other DNA
aatgttgttgacaaccataaagtgatatttaataattatttataatcagcaacttaaccacaaaacaaccatatattgatatctcacaaaacaaccataagttgatatttttgtgaatcgagtatttcagcaaaactactgcagtaagaaag

SEQ ID NO: 4143 - DNA, 152 bp, synthetic construct
  source 1..152: mol_type = other DNA
aatgttgttgatcaaccataaagtgatatttaataattatttataatcagcaacttaaccacaaaacaaccatatattgatatctcacaaaacaaccataagttgatatttttgtgaatcgagtatttcagcaaaactactgcagtaagaaa

SEQ ID NO: 4144 - DNA, 152 bp, synthetic construct
  source 1..152: mol_type = other DNA
aatgttgttgatgtcaaccataaagtgatatttaataattatttataatcagcaacttaaccacaaaacaaccatatattgatatctcacaaaacaaccataagttgatatttttgtgaatcgagtatttcagcaaaactactgcagtaaga

SEQ ID NO: 4145 - DNA, 152 bp, synthetic construct
  source 1..152: mol_type = other DNA
aatgttgttgatgtgcaaccataaagtgatatttaataattatttataatcagcaacttaaccacaaaacaaccatatattgatatctcacaaaacaaccataagttgatatttttgtgaatcgagtatttcagcaaaactactgcagtaag

SEQ ID NO: 4146 - DNA, 152 bp, synthetic construct
  source 1..152: mol_type = other DNA
aatgttgttgatgtgtcaaccataaagtgatatttaataattatttataatcagcaacttaaccacaaaacaaccatatattgatatctcacaaaacaaccataagttgatatttttgtgaatcgagtatttcagcaaaactactgcagtaa

SEQ ID NO: 4147 - DNA, 152 bp, synthetic construct
  source 1..152: mol_type = other DNA
aatgttgttgatgtgttcaaccataaagtgatatttaataattatttataatcagcaacttaaccacaaaacaaccatatattgatatctcacaaaacaaccataagttgatatttttgtgaatcgagtatttcagcaaaactactgcagta

SEQ ID NO: 4148 - DNA, 152 bp, synthetic construct
  source 1..152: mol_type = other DNA
aatgttgttgatgtgttgcaaccataaagtgatatttaataattatttataatcagcaacttaaccacaaaacaaccatatattgatatctcacaaaacaaccataagttgatatttttgtgaatcgagtatttcagcaaaactactgcagt

SEQ ID NO: 4149 - DNA, 152 bp, synthetic construct
  source 1..152: mol_type = other DNA
aatgttgttgatgtgttgacaaccataaagtgatatttaataattatttataatcagcaacttaaccacaaaacaaccatatattgatatctcacaaaacaaccataagttgatatttttgtgaatcgagtatttcagcaaaactactgcag

SEQ ID NO: 4150 - DNA, 152 bp, synthetic construct
  source 1..152: mol_type = other DNA
aatgttgttgatgtgttgatcaaccataaagtgatatttaataattatttataatcagcaacttaaccacaaaacaaccatatattgatatctcacaaaacaaccataagttgatatttttgtgaatcgagtatttcagcaaaactactgca

SEQ ID NO: 4151 - DNA, 152 bp, synthetic construct
  source 1..152: mol_type = other DNA
aatgttgttgatgtgttgatgcaaccataaagtgatatttaataattatttataatcagcaacttaaccacaaaacaaccatatattgatatctcacaaaacaaccataagttgatatttttgtgaatcgagtatttcagcaaaactactgc

SEQ ID NO: 4152 - DNA, 152 bp, synthetic construct
  source 1..152: mol_type = other DNA
aatgttgttgatgcaaccataaagtgatatttaataattatttataatcagcaacttaaccacaaacaaccatatattgatatctcaacaaaacaaccataagttgatatttttgtgaatcgagtatttcagcaaaactactgcagtaagaa

SEQ ID NO: 4153 - DNA, 152 bp, synthetic construct
  source 1..152: mol_type = other DNA
aatgttgttgatgcaaccataaagtgatatttaataattatttataatcagcaacttaaccacaacaaccatatattgatatctcaaacaaaacaaccataagttgatatttttgtgaatcgagtatttcagcaaaactactgcagtaagaa

SEQ ID NO: 4154 - DNA, 152 bp, synthetic construct
  source 1..152: mol_type = other DNA
aatgttgttgatgcaaccataaagtgatatttaataattatttataatcagcaacttaaccacacaaccatatattgatatctcaaaacaaaacaaccataagttgatatttttgtgaatcgagtatttcagcaaaactactgcagtaagaa

SEQ ID NO: 4155 - DNA, 152 bp, synthetic construct
  source 1..152: mol_type = other DNA
aatgttgttgatgcaaccataaagtgatatttaataattatttataatcagcaacttaaccaccaaccatatattgatatctcaaaaacaaaacaaccataagttgatatttttgtgaatcgagtatttcagcaaaactactgcagtaagaa

SEQ ID NO: 4156 - DNA, 152 bp, synthetic construct
  source 1..152: mol_type = other DNA
aatgttgttgatgcaaccataaagtgatatttaataattatttataatcagcaacttaaccacaaccatatattgatatctccaaaaacaaaacaaccataagttgatatttttgtgaatcgagtatttcagcaaaactactgcagtaagaa

SEQ ID NO: 4157 - DNA, 152 bp, synthetic construct
  source 1..152: mol_type = other DNA
aatgttgttgatgcaaccataaagtgatatttaataattatttataatcagcaacttaacccaaccatatattgatatctcacaaaaacaaaacaaccataagttgatatttttgtgaatcgagtatttcagcaaaactactgcagtaagaa

SEQ ID NO: 4158 - DNA, 152 bp, synthetic construct
  source 1..152: mol_type = other DNA
aatgttgttgatgcaaccataaagtgatatttaataattatttataatcagcaacttaaccaaccatatattgatatctccacaaaaacaaaacaaccataagttgatatttttgtgaatcgagtatttcagcaaaactactgcagtaagaa

SEQ ID NO: 4159 - DNA, 152 bp, synthetic construct
  source 1..152: mol_type = other DNA
aatgttgttgatgcaaccataaagtgatatttaataattatttataatcagcaacttaacaaccatatattgatatctcccacaaaaacaaaacaaccataagttgatatttttgtgaatcgagtatttcagcaaaactactgcagtaagaa

SEQ ID NO: 4160 - DNA, 152 bp, synthetic construct
  source 1..152: mol_type = other DNA
aatgttgttgatgcaaccataaagtgatatttaataattatttataatcagcaacttacaaccatatattgatatctcaccacaaaaacaaaacaaccataagttgatatttttgtgaatcgagtatttcagcaaaactactgcagtaagaa

SEQ ID NO: 4161 - DNA, 152 bp, synthetic construct
  source 1..152: mol_type = other DNA
aatgttgttgatgcaaccataaagtgatatttaataattatttataatcagcaacttcaaccatatattgatatctcaaccacaaaaacaaaacaaccataagttgatatttttgtgaatcgagtatttcagcaaaactactgcagtaagaa

SEQ ID NO: 4162 - DNA, 152 bp, synthetic construct
  source 1..152: mol_type = other DNA
aatgttgttgatgcaaccataaagtgatatttaataattatttataatcagcaactcaaccatatattgatatctctaaccacaaaaacaaaacaaccataagttgatatttttgtgaatcgagtatttcagcaaaactactgcagtaagaa

SEQ ID NO: 4163 - DNA, 152 bp, synthetic construct
  source 1..152: mol_type = other DNA
aatgttgttgatgcaaccataaagtgatatttaataattatttataatcagcaaccaaccatatattgatatctcttaaccacaaaaacaaaacaaccataagttgatatttttgtgaatcgagtatttcagcaaaactactgcagtaagaa

SEQ ID NO: 4164 - DNA, 152 bp, synthetic construct
  source 1..152: mol_type = other DNA
aatgttgttgatgcaaccataaagtgatatttaataattatttataatcagcaacaaccatatattgatatctccttaaccacaaaaacaaaacaaccataagttgatatttttgtgaatcgagtatttcagcaaaactactgcagtaagaa

SEQ ID NO: 4165 - DNA, 152 bp, synthetic construct
  source 1..152: mol_type = other DNA
aatgttgttgatgcaaccataaagtgatatttaataattatttataatcagcacaaccatatattgatatctcacttaaccacaaaaacaaaacaaccataagttgatatttttgtgaatcgagtatttcagcaaaactactgcagtaagaa

SEQ ID NO: 4166 - DNA, 152 bp, synthetic construct
  source 1..152: mol_type = other DNA
aatgttgttgatgcaaccataaagtgatatttaataattatttataatcagccaaccatatattgatatctcaacttaaccacaaaaacaaaacaaccataagttgatatttttgtgaatcgagtatttcagcaaaactactgcagtaagaa

SEQ ID NO: 4167 - DNA, 152 bp, synthetic construct
  source 1..152: mol_type = other DNA
aatgttgttgatgcaaccataaagtgatatttaataattatttataatcagcaaccatatattgatatctccaacttaaccacaaaaacaaaacaaccataagttgatatttttgtgaatcgagtatttcagcaaaactactgcagtaagaa

SEQ ID NO: 4168 - DNA, 152 bp, synthetic construct
  source 1..152: mol_type = other DNA
aatgttgttgatgcaaccataaagtgatatttaataattatttataatcacaaccatatattgatatctcgcaacttaaccacaaaaacaaaacaaccataagttgatatttttgtgaatcgagtatttcagcaaaactactgcagtaagaa

SEQ ID NO: 4169 - DNA, 152 bp, synthetic construct
  source 1..152: mol_type = other DNA
aatgttgttgatgcaaccataaagtgatatttaataattatttataatccaaccatatattgatatctcagcaacttaaccacaaaaacaaaacaaccataagttgatatttttgtgaatcgagtatttcagcaaaactactgcagtaagaa

SEQ ID NO: 4170 - DNA, 152 bp, synthetic construct
  source 1..152: mol_type = other DNA
aatgttgttgatgcaaccataaagtgatatttaataattatttataatcaaccatatattgatatctccagcaacttaaccacaaaaacaaaacaaccataagttgatatttttgtgaatcgagtatttcagcaaaactactgcagtaagaa

SEQ ID NO: 4171 - DNA, 152 bp, synthetic construct
  source 1..152: mol_type = other DNA
aatgttgttgatgcaaccataaagtgatatttaataattatttataacaaccatatattgatatctctcagcaacttaaccacaaaaacaaaacaaccataagttgatatttttgtgaatcgagtatttcagcaaaactactgcagtaagaa

SEQ ID NO: 4172 - DNA, 152 bp, synthetic construct
  source 1..152: mol_type = other DNA
aatgttgttgatgcaaccataaagtgatatttaataattatttatacaaccatatattgatatctcatcagcaacttaaccacaaaaacaaaacaaccataagttgatatttttgtgaatcgagtatttcagcaaaactactgcagtaagaa

SEQ ID NO: 4173 - DNA, 152 bp, synthetic construct
  source 1..152: mol_type = other DNA
aatgttgttgatgcaaccataaagtgatatttaataattatttatcaaccatatattgatatctcaatcagcaacttaaccacaaaaacaaaacaaccataagttgatatttttgtgaatcgagtatttcagcaaaactactgcagtaagaa

SEQ ID NO: 4174 - DNA, 152 bp, synthetic construct
  source 1..152: mol_type = other DNA
aatgttgttgatgcaaccataaagtgatatttaataattatttacaaccatatattgatatctctaatcagcaacttaaccacaaaaacaaaacaaccataagttgatatttttgtgaatcgagtatttcagcaaaactactgcagtaagaa

SEQ ID NO: 4175 - DNA, 152 bp, synthetic construct
  source 1..152: mol_type = other DNA
aatgttgttgatgcaaccataaagtgatatttaataattatttcaaccatatattgatatctcataatcagcaacttaaccacaaaaacaaaacaaccataagttgatatttttgtgaatcgagtatttcagcaaaactactgcagtaagaa

SEQ ID NO: 4176 - DNA, 152 bp, synthetic construct
  source 1..152: mol_type = other DNA
aatgttgttgatgcaaccataaagtgatatttaataattattcaaccatatattgatatctctataatcagcaacttaaccacaaaaacaaaacaaccataagttgatatttttgtgaatcgagtatttcagcaaaactactgcagtaagaa

SEQ ID NO: 4177 - DNA, 152 bp, synthetic construct
  source 1..152: mol_type = other DNA
aatgttgttgatgcaaccataaagtgatatttaataattatcaaccatatattgatatctcttataatcagcaacttaaccacaaaaacaaaacaaccataagttgatatttttgtgaatcgagtatttcagcaaaactactgcagtaagaa

SEQ ID NO: 4178 - DNA, 152 bp, synthetic construct
  source 1..152: mol_type = other DNA
aatgttgttgatgcaaccataaagtgatatttaataattacaaccatatattgatatctctttataatcagcaacttaaccacaaaaacaaaacaaccataagttgatatttttgtgaatcgagtatttcagcaaaactactgcagtaagaa

SEQ ID NO: 4179 - DNA, 152 bp, synthetic construct
  source 1..152: mol_type = other DNA
aatgttgttgatgcaaccataaagtgatatttaataattcaaccatatattgatatctcatttataatcagcaacttaaccacaaaaacaaaacaaccataagttgatatttttgtgaatcgagtatttcagcaaaactactgcagtaagaa

SEQ ID NO: 4180 - DNA, 152 bp, synthetic construct
  source 1..152: mol_type = other DNA
aatgttgttgatgcaaccataaagtgatatttaataatcaaccatatattgatatctctatttataatcagcaacttaaccacaaaaacaaaacaaccataagttgatatttttgtgaatcgagtatttcagcaaaactactgcagtaagaa

SEQ ID NO: 4181 - DNA, 152 bp, synthetic construct
  source 1..152: mol_type = other DNA
aatgttgttgatgcaaccataaagtgatatttaataacaaccatatattgatatctcttatttataatcagcaacttaaccacaaaaacaaaacaaccataagttgatatttttgtgaatcgagtatttcagcaaaactactgcagtaagaa

SEQ ID NO: 4182 - DNA, 152 bp, synthetic construct
  source 1..152: mol_type = other DNA
aatgttgttgatgcaaccataaagtgatatttaatacaaccatatattgatatctcattatttataatcagcaacttaaccacaaaaacaaaacaaccataagttgatatttttgtgaatcgagtatttcagcaaaactactgcagtaagaa

SEQ ID NO: 4183 - DNA, 152 bp, synthetic construct
  source 1..152: mol_type = other DNA
aatgttgttgatgcaaccataaagtgatatttaatcaaccatatattgatatctcaattatttataatcagcaacttaaccacaaaaacaaaacaaccataagttgatatttttgtgaatcgagtatttcagcaaaactactgcagtaagaa

SEQ ID NO: 4184 - DNA, 152 bp, synthetic construct
  source 1..152: mol_type = other DNA
aatgttgttgatgcaaccataaagtgatatttaacaaccatatattgatatctctaattatttataatcagcaacttaaccacaaaaacaaaacaaccataagttgatatttttgtgaatcgagtatttcagcaaaactactgcagtaagaa

SEQ ID NO: 4185 - DNA, 152 bp, synthetic construct
  source 1..152: mol_type = other DNA
aatgttgttgatgcaaccataaagtgatatttacaaccatatattgatatctcataattatttataatcagcaacttaaccacaaaaacaaaacaaccataagttgatatttttgtgaatcgagtatttcagcaaaactactgcagtaagaa

SEQ ID NO: 4186 - DNA, 152 bp, synthetic construct
  source 1..152: mol_type = other DNA
aatgttgttgatgcaaccataaagtgatatttaataattatttataatcagcaacttaaccacaaacaaccatatattgatatctcacaaaacaaccataagttgatatttttgtgaatcgagtatttcagcaaaactactgcagtaagaaa

SEQ ID NO: 4187 - DNA, 152 bp, synthetic construct
  source 1..152: mol_type = other DNA
aatgttgttgatgcaaccataaagtgatatttaataattatttataatcagcaacttaaccacaacaaccatatattgatatctcacaaaacaaccataagttgatatttttgtgaatcgagtatttcagcaaaactactgcagtaagaaag

SEQ ID NO: 4188 - DNA, 152 bp, synthetic construct
  source 1..152: mol_type = other DNA
aatgttgttgatgcaaccataaagtgatatttaataattatttataatcagcaacttaaccacacaaccatatattgatatctcacaaaacaaccataagttgatatttttgtgaatcgagtatttcagcaaaactactgcagtaagaaagt

SEQ ID NO: 4189 - DNA, 152 bp, synthetic construct
  source 1..152: mol_type = other DNA
aatgttgttgatgcaaccataaagtgatatttaataattatttataatcagcaacttaaccaccaaccatatattgatatctcacaaaacaaccataagttgatatttttgtgaatcgagtatttcagcaaaactactgcagtaagaaagtt

SEQ ID NO: 4190 - DNA, 152 bp, synthetic construct
  source 1..152: mol_type = other DNA
aatgttgttgatgcaaccataaagtgatatttaataattatttataatcagcaacttaaccacaaccatatattgatatctcacaaaacaaccataagttgatatttttgtgaatcgagtatttcagcaaaactactgcagtaagaaagtta

SEQ ID NO: 4191 - DNA, 152 bp, synthetic construct
  source 1..152: mol_type = other DNA
aatgttgttgatgcaaccataaagtgatatttaataattatttataatcagcaacttaacccaaccatatattgatatctcacaaaacaaccataagttgatatttttgtgaatcgagtatttcagcaaaactactgcagtaagaaagttac

SEQ ID NO: 4192 - DNA, 152 bp, synthetic construct
  source 1..152: mol_type = other DNA
aatgttgttgatgcaaccataaagtgatatttaataattatttataatcagcaacttaaccaaccatatattgatatctcacaaaacaaccataagttgatatttttgtgaatcgagtatttcagcaaaactactgcagtaagaaagttact

SEQ ID NO: 4193 - DNA, 152 bp, synthetic construct
  source 1..152: mol_type = other DNA
aatgttgttgatgcaaccataaagtgatatttaataattatttataatcagcaacttaacaaccatatattgatatctcacaaaacaaccataagttgatatttttgtgaatcgagtatttcagcaaaactactgcagtaagaaagttactt

SEQ ID NO: 4194 - DNA, 152 bp, synthetic construct
  source 1..152: mol_type = other DNA
aatgttgttgatgcaaccataaagtgatatttaataattatttataatcagcaacttacaaccatatattgatatctcacaaaacaaccataagttgatatttttgtgaatcgagtatttcagcaaaactactgcagtaagaaagttacttc

SEQ ID NO: 4195 - DNA, 152 bp, synthetic construct
  source 1..152: mol_type = other DNA
aatgttgttgatgcaaccataaagtgatatttaataattatttataatcagcaacttcaaccatatattgatatctcacaaaacaaccataagttgatatttttgtgaatcgagtatttcagcaaaactactgcagtaagaaagttacttcg

SEQ ID NO: 4196 - DNA, 152 bp, synthetic construct
  source 1..152: mol_type = other DNA
aatgttgttgatgcaaccataaagtgatatttaataattatttataatcagcaactcaaccatatattgatatctcacaaaacaaccataagttgatatttttgtgaatcgagtatttcagcaaaactactgcagtaagaaagttacttcgt

SEQ ID NO: 4197 - DNA, 152 bp, synthetic construct
  source 1..152: mol_type = other DNA
aatgttgttgatgcaaccataaagtgatatttaataattatttataatcagcaaccaaccatatattgatatctcacaaaacaaccataagttgatatttttgtgaatcgagtatttcagcaaaactactgcagtaagaaagttacttcgtg

SEQ ID NO: 4198 - DNA, 152 bp, synthetic construct
  source 1..152: mol_type = other DNA
aatgttgttgatgcaaccataaagtgatatttaataattatttataatcagcaacaaccatatattgatatctcacaaaacaaccataagttgatatttttgtgaatcgagtatttcagcaaaactactgcagtaagaaagttacttcgtgg

SEQ ID NO: 4199 - DNA, 152 bp, synthetic construct
  source 1..152: mol_type = other DNA
aatgttgttgatgcaaccataaagtgatatttaataattatttataatcagcacaaccatatattgatatctcacaaaacaaccataagttgatatttttgtgaatcgagtatttcagcaaaactactgcagtaagaaagttacttcgtggt

SEQ ID NO: 4200 - DNA, 152 bp, synthetic construct
  source 1..152: mol_type = other DNA
aatgttgttgatgcaaccataaagtgatatttaataattatttataatcagccaaccatatattgatatctcacaaaacaaccataagttgatatttttgtgaatcgagtatttcagcaaaactactgcagtaagaaagttacttcgtggta

SEQ ID NO: 4201 - DNA, 152 bp, synthetic construct
  source 1..152: mol_type = other DNA
aatgttgttgatgcaaccataaagtgatatttaataattatttataatcagcaaccatatattgatatctcacaaaacaaccataagttgatatttttgtgaatcgagtatttcagcaaaactactgcagtaagaaagttacttcgtggtat

SEQ ID NO: 4202 - DNA, 152 bp, synthetic construct
  source 1..152: mol_type = other DNA
aatgttgttgatgcaaccataaagtgatatttaataattatttataatcacaaccatatattgatatctcacaaaacaaccataagttgatatttttgtgaatcgagtatttcagcaaaactactgcagtaagaaagttacttcgtggtatg

SEQ ID NO: 4203 - DNA, 152 bp, synthetic construct
  source 1..152: mol_type = other DNA
aatgttgttgatgcaaccataaagtgatatttaataattatttataatccaaccatatattgatatctcacaaaacaaccataagttgatatttttgtgaatcgagtatttcagcaaaactactgcagtaagaaagttacttcgtggtatgg

SEQ ID NO: 4204 - DNA, 152 bp, synthetic construct
  source 1..152: mol_type = other DNA
aatgttgttgatgcaaccataaagtgatatttaataattatttataatcaaccatatattgatatctcacaaaacaaccataagttgatatttttgtgaatcgagtatttcagcaaaactactgcagtaagaaagttacttcgtggtatggg

SEQ ID NO: 4205 - DNA, 152 bp, synthetic construct
  source 1..152: mol_type = other DNA
aatgttgttgatgcaaccataaagtgatatttaataattatttataacaaccatatattgatatctcacaaaacaaccataagttgatatttttgtgaatcgagtatttcagcaaaactactgcagtaagaaagttacttcgtggtatggga

SEQ ID NO: 4206 - DNA, 152 bp, synthetic construct
  source 1..152: mol_type = other DNA
aatgttgttgatgcaaccataaagtgatatttaataattatttatacaaccatatattgatatctcacaaaacaaccataagttgatatttttgtgaatcgagtatttcagcaaaactactgcagtaagaaagttacttcgtggtatgggag

SEQ ID NO: 4207 - DNA, 152 bp, synthetic construct
  source 1..152: mol_type = other DNA
aatgttgttgatgcaaccataaagtgatatttaataattatttatcaaccatatattgatatctcacaaaacaaccataagttgatatttttgtgaatcgagtatttcagcaaaactactgcagtaagaaagttacttcgtggtatgggagg

SEQ ID NO: 4208 - DNA, 152 bp, synthetic construct
  source 1..152: mol_type = other DNA
aatgttgttgatgcaaccataaagtgatatttaataattatttacaaccatatattgatatctcacaaaacaaccataagttgatatttttgtgaatcgagtatttcagcaaaactactgcagtaagaaagttacttcgtggtatgggagga

SEQ ID NO: 4209 - DNA, 152 bp, synthetic construct
  source 1..152: mol_type = other DNA
aatgttgttgatgcaaccataaagtgatatttaataattatttcaaccatatattgatatctcacaaaacaaccataagttgatatttttgtgaatcgagtatttcagcaaaactactgcagtaagaaagttacttcgtggtatgggaggat

SEQ ID NO: 4210 - DNA, 152 bp, synthetic construct
  source 1..152: mol_type = other DNA
aatgttgttgatgcaaccataaagtgatatttaataattattcaaccatatattgatatctcacaaaacaaccataagttgatatttttgtgaatcgagtatttcagcaaaactactgcagtaagaaagttacttcgtggtatgggaggatc

SEQ ID NO: 4211 - DNA, 152 bp, synthetic construct
  source 1..152: mol_type = other DNA
aatgttgttgatgcaaccataaagtgatatttaataattatcaaccatatattgatatctcacaaaacaaccataagttgatatttttgtgaatcgagtatttcagcaaaactactgcagtaagaaagttacttcgtggtatgggaggatca

SEQ ID NO: 4212 - DNA, 152 bp, synthetic construct
  source 1..152: mol_type = other DNA
aatgttgttgatgcaaccataaagtgatatttaataattacaaccatatattgatatctcacaaaacaaccataagttgatatttttgtgaatcgagtatttcagcaaaactactgcagtaagaaagttacttcgtggtatgggaggatcaa

SEQ ID NO: 4213 - DNA, 152 bp, synthetic construct
  source 1..152: mol_type = other DNA
aatgttgttgatgcaaccataaagtgatatttaataattcaaccatatattgatatctcacaaaacaaccataagttgatatttttgtgaatcgagtatttcagcaaaactactgcagtaagaaagttacttcgtggtatgggaggatcaag

SEQ ID NO: 4214 - DNA, 152 bp, synthetic construct
  source 1..152: mol_type = other DNA
aatgttgttgatgcaaccataaagtgatatttaataatcaaccatatattgatatctcacaaaacaaccataagttgatatttttgtgaatcgagtatttcagcaaaactactgcagtaagaaagttacttcgtggtatgggaggatcaagg

SEQ ID NO: 4215 - DNA, 152 bp, synthetic construct
  source 1..152: mol_type = other DNA
aatgttgttgatgcaaccataaagtgatatttaataacaaccatatattgatatctcacaaaacaaccataagttgatatttttgtgaatcgagtatttcagcaaaactactgcagtaagaaagttacttcgtggtatgggaggatcaagga

SEQ ID NO: 4216 - DNA, 152 bp, synthetic construct
  source 1..152: mol_type = other DNA
aatgttgttgatgcaaccataaagtgatatttaatacaaccatatattgatatctcacaaaacaaccataagttgatatttttgtgaatcgagtatttcagcaaaactactgcagtaagaaagttacttcgtggtatgggaggatcaaggag

SEQ ID NO: 4217 - DNA, 152 bp, synthetic construct
  source 1..152: mol_type = other DNA
aatgttgttgatgcaaccataaagtgatatttaatcaaccatatattgatatctcacaaaacaaccataagttgatatttttgtgaatcgagtatttcagcaaaactactgcagtaagaaagttacttcgtggtatgggaggatcaaggagc

SEQ ID NO: 4218 - DNA, 152 bp, synthetic construct
  source 1..152: mol_type = other DNA
aatgttgttgatgcaaccataaagtgatatttaacaaccatatattgatatctcacaaaacaaccataagttgatatttttgtgaatcgagtatttcagcaaaactactgcagtaagaaagttacttcgtggtatgggaggatcaaggagcc

SEQ ID NO: 4219 - DNA, 152 bp, synthetic construct
  source 1..152: mol_type = other DNA
aatgttgttgatgcaaccataaagtgatatttacaaccatatattgatatctcacaaaacaaccataagttgatatttttgtgaatcgagtatttcagcaaaactactgcagtaagaaagttacttcgtggtatgggaggatcaaggagcca

SEQ ID NO: 4220 - DNA, 152 bp, synthetic construct
  source 1..152: mol_type = other DNA
aatgttgttgatgcaaccataaagtgatatttaataattatttataatcagcaacttaaccacaaaacaaccatatattgatatctcacaaacaaccataagttgatatttttgtgaatcgagtatttcagcaaaactactgcagtaagaaa

SEQ ID NO: 4221 - DNA, 152 bp, synthetic construct
  source 1..152: mol_type = other DNA
aatgttgttgatgcaaccataaagtgatatttaataattatttataatcagcaacttaaccacaaaacaaccatatattgatatctcacaacaaccataagttgatatttttgtgaatcgagtatttcagcaaaactactgcagtaagaaag

SEQ ID NO: 4222 - DNA, 152 bp, synthetic construct
  source 1..152: mol_type = other DNA
aatgttgttgatgcaaccataaagtgatatttaataattatttataatcagcaacttaaccacaaaacaaccatatattgatatctcacacaaccataagttgatatttttgtgaatcgagtatttcagcaaaactactgcagtaagaaagt

SEQ ID NO: 4223 - DNA, 152 bp, synthetic construct
  source 1..152: mol_type = other DNA
aatgttgttgatgcaaccataaagtgatatttaataattatttataatcagcaacttaaccacaaaacaaccatatattgatatctcaccaaccataagttgatatttttgtgaatcgagtatttcagcaaaactactgcagtaagaaagtt

SEQ ID NO: 4224 - DNA, 152 bp, synthetic construct
  source 1..152: mol_type = other DNA
aatgttgttgatgcaaccataaagtgatatttaataattatttataatcagcaacttaaccacaaaacaaccatatattgatatctcacaaccataagttgatatttttgtgaatcgagtatttcagcaaaactactgcagtaagaaagtta

SEQ ID NO: 4225 - DNA, 152 bp, synthetic construct
  source 1..152: mol_type = other DNA
aatgttgttgatgcaaccataaagtgatatttaataattatttataatcagcaacttaaccacaaaacaaccatatattgatatctccaaccataagttgatatttttgtgaatcgagtatttcagcaaaactactgcagtaagaaagttac

SEQ ID NO: 4226 - DNA, 152 bp, synthetic construct
  source 1..152: mol_type = other DNA
aatgttgttgatgcaaccataaagtgatatttacaaccatatattgatatctcacaaacaaccataagttgatatttttgtgaatcgagtatttcagcaaaactactgcagtaagaaagttacttcgtggtatgggaggatcaaggagccaa

SEQ ID NO: 4227 - DNA, 152 bp, synthetic construct
  source 1..152: mol_type = other DNA
aatgttgttgatgcaaccataaagtgatatttacaaccatatattgatatctcacaacaaccataagttgatatttttgtgaatcgagtatttcagcaaaactactgcagtaagaaagttacttcgtggtatgggaggatcaaggagccaat

SEQ ID NO: 4228 - DNA, 152 bp, synthetic construct
  source 1..152: mol_type = other DNA
aatgttgttgatgcaaccataaagtgatatttacaaccatatattgatatctcacacaaccataagttgatatttttgtgaatcgagtatttcagcaaaactactgcagtaagaaagttacttcgtggtatgggaggatcaaggagccaata

SEQ ID NO: 4229 - DNA, 152 bp, synthetic construct
  source 1..152: mol_type = other DNA
aatgttgttgatgcaaccataaagtgatatttacaaccatatattgatatctctcacaaccataagttgatatttttgtgaatcgagtatttcagcaaaactactgcagtaagaaagttacttcgtggtatgggaggatcaaggagccaata

SEQ ID NO: 4230 - DNA, 152 bp, synthetic construct
  source 1..152: mol_type = other DNA
aatgttgttgatacaaccataaagtgatatttacaaccatatattgatatctctcacaaccataagttgatatttttgtgaatcgagtatttcagcaaaactactgcagtaagaaagttacttcgtggtatgggaggatcaaggagccaata

SEQ ID NO: 4231 - DNA, 152 bp, synthetic construct
  source 1..152: mol_type = other DNA
aatgttgttgatacaaccataaaatgataattacacccataaattgataattatcacacccataaattgatattgctgtgaatcgagtatttcagcaaaactactgcagtaagaaagttacttcgtggtatgggaggatcaaggagccaata

SEQ ID NO: 4232 - DNA, 152 bp, synthetic construct
  source 1..152: mol_type = other DNA
aatgttgttgatgcaaccataaagtgatatttataattatttataatcagcaacttaaccacaaaacaaccatatattgatatctcacaaaacaaccataagttgatatttttgtgaatcgagtatttcagcaaaactactgcagtaagaaa

SEQ ID NO: 4233 - DNA, 152 bp, synthetic construct
  source 1..152: mol_type = other DNA
aatgttgttgatgcaaccataaagtgatattataattatttataatcagcaacttaaccacaaaacaaccatatattgatatctcacaaaacaaccataagttgatatttttgtgaatcgagtatttcagcaaaactactgcagtaagaaag

SEQ ID NO: 4234 - DNA, 152 bp, synthetic construct
  source 1..152: mol_type = other DNA
aatgttgttgatgcaaccataaagtgatatataattatttataatcagcaacttaaccacaaaacaaccatatattgatatctcacaaaacaaccataagttgatatttttgtgaatcgagtatttcagcaaaactactgcagtaagaaagt

SEQ ID NO: 4235 - DNA, 152 bp, synthetic construct
  source 1..152: mol_type = other DNA
aatgttgttgatgcaaccataaagtgataataattatttataatcagcaacttaaccacaaaacaaccatatattgatatctcacaaaacaaccataagttgatatttttgtgaatcgagtatttcagcaaaactactgcagtaagaaagtt

SEQ ID NO: 4236 - DNA, 152 bp, synthetic construct
  source 1..152: mol_type = other DNA
aatgttgttgatgcaaccataaagtgatataattatttataatcagcaacttaaccacaaaacaaccatatattgatatctcacaaaacaaccataagttgatatttttgtgaatcgagtatttcagcaaaactactgcagtaagaaagtta

SEQ ID NO: 4237 - DNA, 152 bp, synthetic construct
  source 1..152: mol_type = other DNA
aatgttgttgatgcaaccataaagtgatatttaataattatttataatcagcaacttaaccacaaaacaaccatatattgatatctacaaaacaaccataagttgatatttttgtgaatcgagtatttcagcaaaactactgcagtaagaaa

SEQ ID NO: 4238 - DNA, 152 bp, synthetic construct
  source 1..152: mol_type = other DNA
aatgttgttgatgcaaccataaagtgatatttaataattatttataatcagcaacttaaccacaaaacaaccatatattgatatcacaaaacaaccataagttgatatttttgtgaatcgagtatttcagcaaaactactgcagtaagaaag

SEQ ID NO: 4239 - DNA, 152 bp, synthetic construct
  source 1..152: mol_type = other DNA
aatgttgttgatgcaaccataaagtgatatttaataattatttataatcagcaacttaaccacaaaacaaccatatattgatatacaaaacaaccataagttgatatttttgtgaatcgagtatttcagcaaaactactgcagtaagaaagt

SEQ ID NO: 4240 - DNA, 152 bp, synthetic construct
  source 1..152: mol_type = other DNA
aatgttgttgatgcaaccataaagtgatatttaataattatttataatcagcaacttaaccacaaaacaaccatatattgataacaaaacaaccataagttgatatttttgtgaatcgagtatttcagcaaaactactgcagtaagaaagtt

SEQ ID NO: 4241 - DNA, 152 bp, synthetic construct
  source 1..152: mol_type = other DNA
aatgttgttgatgcaaccataaagtgatatttaataattatttataatcagcaacttaaccacaaaacaaccatatattgatacaaaacaaccataagttgatatttttgtgaatcgagtatttcagcaaaactactgcagtaagaaagtta

SEQ ID NO: 4242 - DNA, 152 bp, synthetic construct
  source 1..152: mol_type = other DNA
aatgttgttgatgcaaccataaagtgatatttaataattatttataatcagcaacttaaccacaaaacaaccatatattgatatctcacaaaacaaccataagttgatattttgtgaatcgagtatttcagcaaaactactgcagtaagaaa

SEQ ID NO: 4243 - DNA, 152 bp, synthetic construct
  source 1..152: mol_type = other DNA
aatgttgttgatgcaaccataaagtgatatttaataattatttataatcagcaacttaaccacaaaacaaccatatattgatatctcacaaaacaaccataagttgatatttgtgaatcgagtatttcagcaaaactactgcagtaagaaag

SEQ ID NO: 4244 - DNA, 152 bp, synthetic construct
  source 1..152: mol_type = other DNA
aatgttgttgatgcaaccataaagtgatatttaataattatttataatcagcaacttaaccacaaaacaaccatatattgatatctcacaaaacaaccataagttgatattgtgaatcgagtatttcagcaaaactactgcagtaagaaagt

SEQ ID NO: 4245 - DNA, 152 bp, synthetic construct
  source 1..152: mol_type = other DNA
aatgttgttgatgcaaccataaagtgatatttaataattatttataatcagcaacttaaccacaaaacaaccatatattgatatctcacaaaacaaccataagttgatatgtgaatcgagtatttcagcaaaactactgcagtaagaaagtt

SEQ ID NO: 4246 - DNA, 152 bp, synthetic construct
  source 1..152: mol_type = other DNA
aatgttgttgatgcaaccataaagtgatatttaataattatttataatcagcaacttaaccacaaaacaaccatatattgatatctcacaaaacaaccataagttgattgtgaatcgagtatttcagcaaaactactgcagtaagaaagtta

SEQ ID NO: 4247 - DNA, 152 bp, synthetic construct
  source 1..152: mol_type = other DNA
aatgttgttgatgcaaccataaagtgatatttaataattatttataatcagcaacttaaccacaaacaaccatatattgatatctcacaaaacaaccataagttgatattttatgtgaatcgagtatttcagcaaaactactgcagtaagaa

SEQ ID NO: 4248 - DNA, 152 bp, synthetic construct
  source 1..152: mol_type = other DNA
aatgttgttgatgcaaccataaagtgatatttaataattatttataatcagcaacttaaccacaaccatatattgatatctcacaaaacaaccataagttgatattttcaaaatgtgaatcgagtatttcagcaaaactactgcagtaagaa

SEQ ID NO: 4249 - DNA, 152 bp, synthetic construct
  source 1..152: mol_type = other DNA
aatgttgttgatgcaaccataaagtgatatttaataattatttataatcagcaacttacaaccatatattgatatctcacaaaacaaccataagttgatattttaccacaaaatgtgaatcgagtatttcagcaaaactactgcagtaagaa

SEQ ID NO: 4250 - DNA, 152 bp, synthetic construct
  source 1..152: mol_type = other DNA
aatgttgttgatgcaaccataaagtgatatttaataattatttataatcagcaacttcaaccatatattgatatctcacaaaacaaccataagttgatattttaaccacaaaatgtgaatcgagtatttcagcaaaactactgcagtaagaa

SEQ ID NO: 4251 - DNA, 152 bp, synthetic construct
  source 1..152: mol_type = other DNA
aatgttgttgatgcaaccataaagtgatatttaataattatttataatcagccaaccatatattgatatctcacaaaacaaccataagttgatattttaacttaaccacaaaatgtgaatcgagtatttcagcaaaactactgcagtaagaa

SEQ ID NO: 4252 - DNA, 152 bp, synthetic construct
  source 1..152: mol_type = other DNA
aatgttgttgatgcaaccataaagtgatatttaataattatttataacaaccatatattgatatctcacaaaacaaccataagttgatatttttcagcaacttaaccacaaaatgtgaatcgagtatttcagcaaaactactgcagtaagaa

SEQ ID NO: 4253 - DNA, 152 bp, synthetic construct
  source 1..152: mol_type = other DNA
aatgttgttgatgcaaccataaagtgatatttaataattattcaaccatatattgatatctcacaaaacaaccataagttgatatttttataatcagcaacttaaccacaaaatgtgaatcgagtatttcagcaaaactactgcagtaagaa

SEQ ID NO: 4254 - DNA, 152 bp, synthetic construct
  source 1..152: mol_type = other DNA
aatgttgttgatgcaaccataaagtgatatttaataacaaccatatattgatatctcacaaaacaaccataagttgatattttttatttataatcagcaacttaaccacaaaatgtgaatcgagtatttcagcaaaactactgcagtaagaa

SEQ ID NO: 4255 - DNA, 152 bp, synthetic construct
  source 1..152: mol_type = other DNA
aatgttgttgatgcaaccataaagtgatatttaacaaccatatattgatatctcacaaaacaaccataagttgatatttttaattatttataatcagcaacttaaccacaaaatgtgaatcgagtatttcagcaaaactactgcagtaagaa

SEQ ID NO: 4256 - DNA, 152 bp, synthetic construct
  source 1..152: mol_type = other DNA
aatgttgttgatgcaaccataaagtgatatttacaaccatatattgatatctcacaaaacaaccataagttgatattttataattatttataatcagcaacttaaccacaaaatgtgaatcgagtatttcagcaaaactactgcagtaagaa

SEQ ID NO: 4257 - DNA, 152 bp, synthetic construct
  source 1..152: mol_type = other DNA
aatgttgttgatgcaaccataaagtgatatttaataattatttataatcagcaacttaaccacaaaatgtgacaaccatatattgatatctcacaaaacaaccataagttgatattttatcgagtatttcagcaaaactactgcagtaagaa

SEQ ID NO: 4258 - DNA, 152 bp, synthetic construct
  source 1..152: mol_type = other DNA
aatgttgttgatgcaaccataaagtgatatttaataattatttataatcagcaacttaaccacaaaatgtgaatcgacaaccatatattgatatctcacaaaacaaccataagttgatattttgtatttcagcaaaactactgcagtaagaa

SEQ ID NO: 4259 - DNA, 152 bp, synthetic construct
  source 1..152: mol_type = other DNA
aatgttgttgatgcaaccataaagtgatatttaataattatttataatcagcaacttaaccacaaaatgtgaatcgagtattcaaccatatattgatatctcacaaaacaaccataagttgatatttttcagcaaaactactgcagtaagaa

SEQ ID NO: 4260 - DNA, 152 bp, synthetic construct
  source 1..152: mol_type = other DNA
aatgttgttgatgcaaccataaagtgatatttaataattatttataatcagcaacttaaccacaaaatgtgaatcgagtatttcagccaaccatatattgatatctcacaaaacaaccataagttgatattttaaaactactgcagtaagaa

SEQ ID NO: 4261 - DNA, 152 bp, synthetic construct
  source 1..152: mol_type = other DNA
aatgttgttgatgcaaccataaagtgatatttaataattatttataatcagcaacttaaccacaaaatgtgaatcgagtatttcagcaaaaccaaccatatattgatatctcacaaaacaaccataagttgatatttttactgcagtaagaa

SEQ ID NO: 4262 - DNA, 152 bp, synthetic construct
  source 1..152: mol_type = other DNA
aatgttgttgatgcaaccataaagtgatatttaataattatttataatcagcaacttaaccacaaaatgtgaatcgagtatttcagcaaaactactgcaaccatatattgatatctcacaaaacaaccataagttgatattttcagtaagaa

SEQ ID NO: 4263 - DNA, 152 bp, synthetic construct
  source 1..152: mol_type = other DNA
aatgttgttgatgcaaccataaagtgatatttaataattatttataatcagcaacttaaccacaaaatgtgaatcgagtatttcagcaaaactactgcagtacaaccatatattgatatctcacaaaacaaccataagttgatattttagaa

SEQ ID NO: 4264 - DNA, 152 bp, synthetic construct
  source 1..152: mol_type = other DNA
aatgttgttgatgcaaccataaagtgatatttaataattatttataatcagcaacttaaccacaaaatgtgaatcgagtatttcagcaaaactactgcagtaagaatcaaccatatattgatatctcacaaaacaaccataagttgatattt

SEQ ID NO: 4265 - DNA, 152 bp, synthetic construct
  source 1..152: mol_type = other DNA
aatgttgttgatgcaaccataaagtgatatttacaaccatatattgatatctctcacaaccataagttgatatttctctgatcatagtcagaccaacattgctacgacccgtattcgcaccgacactgtgaatcgagtatttcagcaaaact

SEQ ID NO: 4266 - DNA, 152 bp, synthetic construct
  source 1..152: mol_type = other DNA
aatgttgttgatgcaaccataaagtgatatttaataattatttataatcagcaacttaaccacaaaacaaccatatattgatatctcacaaaacaaccataagttgatatttttgtgaatcgaggatttcagcaaaactactgcagtaagaa

SEQ ID NO: 4267 - DNA, 152 bp, synthetic construct
  source 1..152: mol_type = other DNA
aatgttgttgatgcaaccataaagtgatatttaataattatttataatcagcaacttaaccacaaaacaaccatatattgatatctcacaaaacaaccataagttgatatttttgtgaatcgatgatttcagcaaaactactgcagtaagaa

SEQ ID NO: 4268 - DNA, 152 bp, synthetic construct
  source 1..152: mol_type = other DNA
aatgttgttgatgcaaccataaagtgatatttaataattatttataatcagcaacttaaccacaaaacaaccatatattgatatctcacaaaacaaccataagttgatatttttgtgaatcgctgatttcagcaaaactactgcagtaagaa

SEQ ID NO: 4269 - DNA, 152 bp, synthetic construct
  source 1..152: mol_type = other DNA
aatgttgttgatgcaaccataaagtgatatttaataattatttataatcagcaacttaaccacaaaacaaccatatattgatatctcacaaaacaaccataagttgatatttttgtgaatctctgatttcagcaaaactactgcagtaagaa

SEQ ID NO: 4270 - DNA, 152 bp, synthetic construct
  source 1..152: mol_type = other DNA
aatgttgttgatgcaaccataaagtgatatttaataattatttataatcagcaacttaaccacaaaacaaccatatattgatatctcacaaaacaaccataagttgatatttttgtgaatatctgatttcagcaaaactactgcagtaagaa

SEQ ID NO: 4271 - DNA, 152 bp, synthetic construct
  source 1..152: mol_type = other DNA
aatgttgttgatgcaaccataaagtgatatttaataattatttataatcagcaacttaaccacaaaacaaccatatattgatatctcacaaaacaaccataagttgatatttttgtgaagatctgatttcagcaaaactactgcagtaagaa

SEQ ID NO: 4272 - DNA, 152 bp, synthetic construct
  source 1..152: mol_type = other DNA
aatgttgttgatgcaaccataaagtgatatttaataattatttataatcagcaacttaaccacaaaacaaccatatattgatatctcacaaaacaaccataagttgatatttttgtgacgatctgatttcagcaaaactactgcagtaagaa

SEQ ID NO: 4273 - DNA, 152 bp, synthetic construct
  source 1..152: mol_type = other DNA
aatgttgttgatgcaaccataaagtgatatttaataattatttataatcagcaacttaaccacaaaacaaccatatattgatatctcacaaaacaaccataagttgatatttttgtgccgatctgatttcagcaaaactactgcagtaagaa

SEQ ID NO: 4274 - DNA, 152 bp, synthetic construct
  source 1..152: mol_type = other DNA
aatgttgttgatgcaaccataaagtgatatttaataattatttataatcagcaacttaaccacaaaacaaccatatattgatatctcacaaaacaaccataagttgatatttttgttccgatctgatttcagcaaaactactgcagtaagaa

SEQ ID NO: 4275 - DNA, 152 bp, synthetic construct
  source 1..152: mol_type = other DNA
aatgttgttgatgcaaccataaagtgatatttaataattatttataatcagcaacttaaccacaaaacaaccatatattgatatctcacaaaacaaccataagttgatatttttggtccgatctgatttcagcaaaactactgcagtaagaa

SEQ ID NO: 4276 - DNA, 152 bp, synthetic construct
  source 1..152: mol_type = other DNA
aatgttgttgatgcaaccataaagtgatatttaataattatttataatcagcaacttaaccacaaaacaaccatatattgatatctcacaaaacaaccataagttgatattttttgtccgatctgatttcagcaaaactactgcagtaagaa

SEQ ID NO: 4277 - DNA, 152 bp, synthetic construct
  source 1..152: mol_type = other DNA
aatgttgttgatgcaaccataaagtgatatttaataattatttataatcagcaacttaaccacaaaacaaccatatattgatatctcacaaaacaaccataagttgatattttgtgtccgatctgatttcagcaaaactactgcagtaagaa

SEQ ID NO: 4278 - DNA, 152 bp, synthetic construct
  source 1..152: mol_type = other DNA
aatgttgttgatgcaaccataaagtgatatttaataattatttataatcagcaacttaaccacaaaacaaccatatattgatatctcacaaaacaaccataagttgatatttggtgtccgatctgatttcagcaaaactactgcagtaagaa

SEQ ID NO: 4279 - DNA, 152 bp, synthetic construct
  source 1..152: mol_type = other DNA
aatgttgttgatgcaaccataaagtgatatttaataattatttataatcagcaacttaaccacaaaacaaccatatattgatatctcacaaaacaaccataagttgatattgggtgtccgatctgatttcagcaaaactactgcagtaagaa

SEQ ID NO: 4280 - DNA, 152 bp, synthetic construct
  source 1..152: mol_type = other DNA
aatgttgttgatgcaaccataaagtgatatttaataattatttataatcagcaacttaaccacaaaacaaccatatattgatatctcacaaaacaaccataagttgatatggggtgtccgatctgatttcagcaaaactactgcagtaagaa

SEQ ID NO: 4281 - DNA, 152 bp, synthetic construct
  source 1..152: mol_type = other DNA
aatgttgttgatgcaaccataaagtgatatttaataattatttataatcagcaacttaaccacaaaacaaccatatattgatatctcacaaaacaaccataagttgatagggggtgtccgatctgatttcagcaaaactactgcagtaagaa

SEQ ID NO: 4282 - DNA, 152 bp, synthetic construct
  source 1..152: mol_type = other DNA
aatgttgttgatgcaaccataaagtgatatttaataattatttataatcagcaacttaaccacaaaacaaccatatattgatatctcacaaaacaaccataagttgatcgggggtgtccgatctgatttcagcaaaactactgcagtaagaa

SEQ ID NO: 4283 - DNA, 152 bp, synthetic construct
  source 1..152: mol_type = other DNA
aatgttgttgatgcaaccataaagtgatatttaataattatttataatcagcaacttaaccacaaaacaaccatatattgatatctcacaaaacaaccataagttgagcgggggtgtccgatctgatttcagcaaaactactgcagtaagaa

SEQ ID NO: 4284 - DNA, 152 bp, synthetic construct
  source 1..152: mol_type = other DNA
aatgttgttgatgcaaccataaagtgatatttaataattatttataatcagcaacttaaccacaaaacaaccatatattgatatctcacaaaacaaccataagttgcgcgggggtgtccgatctgatttcagcaaaactactgcagtaagaa

SEQ ID NO: 4285 - DNA, 152 bp, synthetic construct
  source 1..152: mol_type = other DNA
aatgttgttgatgcaaccataaagtgatatttaataattatttataatcagcaacttaaccacaaaacaaccatatattgatatctcacaaaacaaccataagtttcgcgggggtgtccgatctgatttcagcaaaactactgcagtaagaa

SEQ ID NO: 4286 - DNA, 152 bp, synthetic construct
  source 1..152: mol_type = other DNA
aatgttgttgatgcaaccataaagtgatatttaataattatttataatcagcaacttaaccacaaaacaaccatatattgatatctcacaaaacaaccataagtgtcgcgggggtgtccgatctgatttcagcaaaactactgcagtaagaa

SEQ ID NO: 4287 - DNA, 152 bp, synthetic construct
  source 1..152: mol_type = other DNA
aatgttgttgatgcaaccataaagtgatatttaataattatttataatcagcaacttaaccacaaaacaaccatatattgatatctcacaaaacaaccataagggtcgcgggggtgtccgatctgatttcagcaaaactactgcagtaagaa

SEQ ID NO: 4288 - DNA, 152 bp, synthetic construct
  source 1..152: mol_type = other DNA
aatgttgttgatgcaaccataaagtgatatttaataattatttataatcagcaacttaaccacaaaacaaccatatattgatatctcacaaaacaaccataatggtcgcgggggtgtccgatctgatttcagcaaaactactgcagtaagaa

SEQ ID NO: 4289 - DNA, 152 bp, synthetic construct
  source 1..152: mol_type = other DNA
aatgttgttgatgcaaccataaagtgatatttaataattatttataatcagcaacttaaccacaaaacaaccatatattgatatctcacaaaacaaccatactggtcgcgggggtgtccgatctgatttcagcaaaactactgcagtaagaa

SEQ ID NO: 4290 - DNA, 152 bp, synthetic construct
  source 1..152: mol_type = other DNA
aatgttgttgatgcaaccataaagtgatatttaataattatttataatcagcaacttaaccacaaaacaaccatatattgatatctcacaaaacaaccatcctggtcgcgggggtgtccgatctgatttcagcaaaactactgcagtaagaa

SEQ ID NO: 4291 - DNA, 152 bp, synthetic construct
  source 1..152: mol_type = other DNA
aatgttgttgatgcaaccataaagtgatatttaataattatttataatcagcaacttaaccacaaaacaaccatatattgatatctcacaaaacaaccagcctggtcgcgggggtgtccgatctgatttcagcaaaactactgcagtaagaa

SEQ ID NO: 4292 - DNA, 152 bp, synthetic construct
  source 1..152: mol_type = other DNA
aatgttgttgatgcaaccataaagtgatatttaataattatttataatcagcaacttaaccacaaaacaaccatatattgatatctcacaaaacaacccgcctggtcgcgggggtgtccgatctgatttcagcaaaactactgcagtaagaa

SEQ ID NO: 4293 - DNA, 152 bp, synthetic construct
  source 1..152: mol_type = other DNA
aatgttgttgatgcaaccataaagtgatatttaataattatttataatcagcaacttaaccacaaaacaaccatatattgatatctcacaaaacaacacgcctggtcgcgggggtgtccgatctgatttcagcaaaactactgcagtaagaa

SEQ ID NO: 4294 - DNA, 152 bp, synthetic construct
  source 1..152: mol_type = other DNA
aatgttgttgatgcaaccataaagtgatatttaataattatttataatcagcaacttaaccacaaaacaaccatatattgatatctcacaaaacaaaacgcctggtcgcgggggtgtccgatctgatttcagcaaaactactgcagtaagaa

SEQ ID NO: 4295 - DNA, 152 bp, synthetic construct
  source 1..152: mol_type = other DNA
aatgttgttgatgcaaccataaagtgatatttaataattatttataatcagcaacttaaccacaaaacaaccatatattgatatctcacaaaacacaacgcctggtcgcgggggtgtccgatctgatttcagcaaaactactgcagtaagaa

SEQ ID NO: 4296 - DNA, 152 bp, synthetic construct
  source 1..152: mol_type = other DNA
aatgttgttgatgcaaccataaagtgatatttaataattatttataatcagcaacttaaccacaaaacaaccatatattgatatctcacaaaacccaacgcctggtcgcgggggtgtccgatctgatttcagcaaaactactgcagtaagaa

SEQ ID NO: 4297 - DNA, 152 bp, synthetic construct
  source 1..152: mol_type = other DNA
aatgttgttgatgcaaccataaagtgatatttaataattatttataatcagcaacttaaccacaaaacaaccatatattgatatctcacaaaaaccaacgcctggtcgcgggggtgtccgatctgatttcagcaaaactactgcagtaagaa

SEQ ID NO: 4298 - DNA, 152 bp, synthetic construct
  source 1..152: mol_type = other DNA
aatgttgttgatgcaaccataaagtgatatttaataattatttataatcagcaacttaaccacaaaacaaccatatattgatatctcacaaacaccaacgcctggtcgcgggggtgtccgatctgatttcagcaaaactactgcagtaagaa

SEQ ID NO: 4299 - DNA, 152 bp, synthetic construct
  source 1..152: mol_type = other DNA
aatgttgttgatgcaaccataaagtgatatttaataattatttataatcagcaacttaaccacaaaacaaccatatattgatatctcacaaccaccaacgcctggtcgcgggggtgtccgatctgatttcagcaaaactactgcagtaagaa

SEQ ID NO: 4300 - DNA, 152 bp, synthetic construct
  source 1..152: mol_type = other DNA
aatgttgttgatgcaaccataaagtgatatttaataattatttataatcagcaacttaaccacaaaacaaccatatattgatatctcacacccaccaacgcctggtcgcgggggtgtccgatctgatttcagcaaaactactgcagtaagaa

SEQ ID NO: 4301 - DNA, 152 bp, synthetic construct
  source 1..152: mol_type = other DNA
aatgttgttgatgcaaccataaagtgatatttaataattatttataatcagcaacttaaccacaaaacaaccatatattgatatctcacccccaccaacgcctggtcgcgggggtgtccgatctgatttcagcaaaactactgcagtaagaa

SEQ ID NO: 4302 - DNA, 152 bp, synthetic construct
  source 1..152: mol_type = other DNA
aatgttgttgatgcaaccataaagtgatatttaataattatttataatcagcaacttaaccacaaaacaaccatatattgatatctcaaccccaccaacgcctggtcgcgggggtgtccgatctgatttcagcaaaactactgcagtaagaa

SEQ ID NO: 4303 - DNA, 152 bp, synthetic construct
  source 1..152: mol_type = other DNA
aatgttgttgatgcaaccataaagtgatatttaataattatttataatcagcaacttaaccacaaaacaaccatatattgatatctccaccccaccaacgcctggtcgcgggggtgtccgatctgatttcagcaaaactactgcagtaagaa

SEQ ID NO: 4304 - DNA, 152 bp, synthetic construct
  source 1..152: mol_type = other DNA
aatgttgttgatgcaaccataaagtgatatttaataattatttataatcagcaacttaaccacaaaacaaccatatattgatatctacaccccaccaacgcctggtcgcgggggtgtccgatctgatttcagcaaaactactgcagtaagaa

SEQ ID NO: 4305 - DNA, 152 bp, synthetic construct
  source 1..152: mol_type = other DNA
aatgttgttgatgcaaccataaagtgatatttaataattatttataatcagcaacttaaccacaaaacaaccatatattgatatcgacaccccaccaacgcctggtcgcgggggtgtccgatctgatttcagcaaaactactgcagtaagaa

SEQ ID NO: 4306 - DNA, 152 bp, synthetic construct
  source 1..152: mol_type = other DNA
aatgttgttgatgcaaccataaagtgatatttaataattatttataatcagcaacttaaccacaaaacaaccatatattgatatagacaccccaccaacgcctggtcgcgggggtgtccgatctgatttcagcaaaactactgcagtaagaa

SEQ ID NO: 4307 - DNA, 152 bp, synthetic construct
  source 1..152: mol_type = other DNA
aatgttgttgatgcaaccataaagtgatatttaataattatttataatcagcaacttaaccacaaaacaaccatatattgatagagacaccccaccaacgcctggtcgcgggggtgtccgatctgatttcagcaaaactactgcagtaagaa

SEQ ID NO: 4308 - DNA, 152 bp, synthetic construct
  source 1..152: mol_type = other DNA
aatgttgttgatgcaaccataaagtgatatttaataattatttataatcagcaacttaaccacaaaacaaccatatattgatcgagacaccccaccaacgcctggtcgcgggggtgtccgatctgatttcagcaaaactactgcagtaagaa

SEQ ID NO: 4309 - DNA, 152 bp, synthetic construct
  source 1..152: mol_type = other DNA
aatgttgttgatgcaaccataaagtgatatttaataattatttataatcagcaacttaaccacaaaacaaccatatattgagcgagacaccccaccaacgcctggtcgcgggggtgtccgatctgatttcagcaaaactactgcagtaagaa

SEQ ID NO: 4310 - DNA, 152 bp, synthetic construct
  source 1..152: mol_type = other DNA
aatgttgttgatgcaaccataaagtgatatttaataattatttataatcagcaacttaaccacaaaacaaccatatattgcgcgagacaccccaccaacgcctggtcgcgggggtgtccgatctgatttcagcaaaactactgcagtaagaa

SEQ ID NO: 4311 - DNA, 152 bp, synthetic construct
  source 1..152: mol_type = other DNA
aatgttgttgatgcaaccataaagtgatatttaataattatttataatcagcaacttaaccacaaaacaaccatatatttcgcgagacaccccaccaacgcctggtcgcgggggtgtccgatctgatttcagcaaaactactgcagtaagaa

SEQ ID NO: 4312 - DNA, 152 bp, synthetic construct
  source 1..152: mol_type = other DNA
aatgttgttgatgcaaccataaagtgatatttaataattatttataatcagcaacttaaccacaaaacaaccatatatgtcgcgagacaccccaccaacgcctggtcgcgggggtgtccgatctgatttcagcaaaactactgcagtaagaa

SEQ ID NO: 4313 - DNA, 152 bp, synthetic construct
  source 1..152: mol_type = other DNA
aatgttgttgatgcaaccataaagtgatatttaataattatttataatcagcaacttaaccacaaaacaaccatataggtcgcgagacaccccaccaacgcctggtcgcgggggtgtccgatctgatttcagcaaaactactgcagtaagaa

SEQ ID NO: 4314 - DNA, 152 bp, synthetic construct
  source 1..152: mol_type = other DNA
aatgttgttgatgcaaccataaagtgatatttaataattatttataatcagcaacttaaccacaaaacaaccatatcggtcgcgagacaccccaccaacgcctggtcgcgggggtgtccgatctgatttcagcaaaactactgcagtaagaa

SEQ ID NO: 4315 - DNA, 152 bp, synthetic construct
  source 1..152: mol_type = other DNA
aatgttgttgatgcaaccataaagtgatatttaataattatttataatcagcaacttaaccacaaaacaaccatagcggtcgcgagacaccccaccaacgcctggtcgcgggggtgtccgatctgatttcagcaaaactactgcagtaagaa

SEQ ID NO: 4316 - DNA, 152 bp, synthetic construct
  source 1..152: mol_type = other DNA
aatgttgttgatgcaaccataaagtgatatttaataattatttataatcagcaacttaaccacaaaacaaccatcgcggtcgcgagacaccccaccaacgcctggtcgcgggggtgtccgatctgatttcagcaaaactactgcagtaagaa

SEQ ID NO: 4317 - DNA, 152 bp, synthetic construct
  source 1..152: mol_type = other DNA
aatgttgttgatgcaaccataaagtgatatttaataattatttataatcagcaacttaaccacaaaacaaccagcgcggtcgcgagacaccccaccaacgcctggtcgcgggggtgtccgatctgatttcagcaaaactactgcagtaagaa

SEQ ID NO: 4318 - DNA, 152 bp, synthetic construct
  source 1..152: mol_type = other DNA
aatgttgttgatgcaaccataaagtgatatttaataattatttataatcagcaacttaaccacaaaacaacccgcgcggtcgcgagacaccccaccaacgcctggtcgcgggggtgtccgatctgatttcagcaaaactactgcagtaagaa

SEQ ID NO: 4319 - DNA, 152 bp, synthetic construct
  source 1..152: mol_type = other DNA
aatgttgttgatgcaaccataaagtgatatttaataattatttataatcagcaacttaaccacaaaacaacacgcgcggtcgcgagacaccccaccaacgcctggtcgcgggggtgtccgatctgatttcagcaaaactactgcagtaagaa

SEQ ID NO: 4320 - DNA, 152 bp, synthetic construct
  source 1..152: mol_type = other DNA
aatgttgttgatgcaaccataaagtgatatttaataattatttataatcagcaacttaaccacaaaacaaaacgcgcggtcgcgagacaccccaccaacgcctggtcgcgggggtgtccgatctgatttcagcaaaactactgcagtaagaa

SEQ ID NO: 4321 - DNA, 152 bp, synthetic construct
  source 1..152: mol_type = other DNA
aatgttgttgatgcaaccataaagtgatatttaataattatttataatcagcaacttaaccacaaaacacaacgcgcggtcgcgagacaccccaccaacgcctggtcgcgggggtgtccgatctgatttcagcaaaactactgcagtaagaa

SEQ ID NO: 4322 - DNA, 152 bp, synthetic construct
  source 1..152: mol_type = other DNA
aatgttgttgatgcaaccataaagtgatatttaataattatttataatcagcaacttaaccacaaaacccaacgcgcggtcgcgagacaccccaccaacgcctggtcgcgggggtgtccgatctgatttcagcaaaactactgcagtaagaa

SEQ ID NO: 4323 - DNA, 152 bp, synthetic construct
  source 1..152: mol_type = other DNA
aatgttgttgatgcaaccataaagtgatatttaataattatttataatcagcaacttaaccacaaaaaccaacgcgcggtcgcgagacaccccaccaacgcctggtcgcgggggtgtccgatctgatttcagcaaaactactgcagtaagaa

SEQ ID NO: 4324 - DNA, 152 bp, synthetic construct
  source 1..152: mol_type = other DNA
aatgttgttgatgcaaccataaagtgatatttaataattatttataatcagcaacttaaccacaaacaccaacgcgcggtcgcgagacaccccaccaacgcctggtcgcgggggtgtccgatctgatttcagcaaaactactgcagtaagaa

SEQ ID NO: 4325 - DNA, 152 bp, synthetic construct
  source 1..152: mol_type = other DNA
aatgttgttgatgcaaccataaagtgatatttaataattatttataatcagcaacttaaccacaaccaccaacgcgcggtcgcgagacaccccaccaacgcctggtcgcgggggtgtccgatctgatttcagcaaaactactgcagtaagaa

SEQ ID NO: 4326 - DNA, 152 bp, synthetic construct
  source 1..152: mol_type = other DNA
aatgttgttgatgcaaccataaagtgatatttaataattatttataatcagcaacttaaccacacccaccaacgcgcggtcgcgagacaccccaccaacgcctggtcgcgggggtgtccgatctgatttcagcaaaactactgcagtaagaa

SEQ ID NO: 4327 - DNA, 152 bp, synthetic construct
  source 1..152: mol_type = other DNA
aatgttgttgatgcaaccataaagtgatatttaataattatttataatcagcaacttaaccacccccaccaacgcgcggtcgcgagacaccccaccaacgcctggtcgcgggggtgtccgatctgatttcagcaaaactactgcagtaagaa

SEQ ID NO: 4328 - DNA, 152 bp, synthetic construct
  source 1..152: mol_type = other DNA
aatgttgttgatgcaaccataaagtgatatttaataattatttataatcagcaacttaaccaaccccaccaacgcgcggtcgcgagacaccccaccaacgcctggtcgcgggggtgtccgatctgatttcagcaaaactactgcagtaagaa

SEQ ID NO: 4329 - DNA, 152 bp, synthetic construct
  source 1..152: mol_type = other DNA
aatgttgttgatgcaaccataaagtgatatttaataattatttataatcagcaacttaacccaccccaccaacgcgcggtcgcgagacaccccaccaacgcctggtcgcgggggtgtccgatctgatttcagcaaaactactgcagtaagaa

SEQ ID NO: 4330 - DNA, 152 bp, synthetic construct
  source 1..152: mol_type = other DNA
aatgttgttgatgcaaccataaagtgatatttaataattatttataatcagcaacttaacacaccccaccaacgcgcggtcgcgagacaccccaccaacgcctggtcgcgggggtgtccgatctgatttcagcaaaactactgcagtaagaa

SEQ ID NO: 4331 - DNA, 152 bp, synthetic construct
  source 1..152: mol_type = other DNA
aatgttgttgatgcaaccataaagtgatatttaataattatttataatcagcaacttaaaacaccccaccaacgcgcggtcgcgagacaccccaccaacgcctggtcgcgggggtgtccgatctgatttcagcaaaactactgcagtaagaa

SEQ ID NO: 4332 - DNA, 152 bp, synthetic construct
  source 1..152: mol_type = other DNA
aatgttgttgatgcaaccataaagtgatatttaataattatttataatcagcaacttacaacaccccaccaacgcgcggtcgcgagacaccccaccaacgcctggtcgcgggggtgtccgatctgatttcagcaaaactactgcagtaagaa

SEQ ID NO: 4333 - DNA, 152 bp, synthetic construct
  source 1..152: mol_type = other DNA
aatgttgttgatgcaaccataaagtgatatttaataattatttataatcagcaacttccaacaccccaccaacgcgcggtcgcgagacaccccaccaacgcctggtcgcgggggtgtccgatctgatttcagcaaaactactgcagtaagaa

SEQ ID NO: 4334 - DNA, 152 bp, synthetic construct
  source 1..152: mol_type = other DNA
aatgttgttgatgcaaccataaagtgatatttaataattatttataatcagcaactgccaacaccccaccaacgcgcggtcgcgagacaccccaccaacgcctggtcgcgggggtgtccgatctgatttcagcaaaactactgcagtaagaa

SEQ ID NO: 4335 - DNA, 152 bp, synthetic construct
  source 1..152: mol_type = other DNA
aatgttgttgatgcaaccataaagtgatatttaataattatttataatcagcaacggccaacaccccaccaacgcgcggtcgcgagacaccccaccaacgcctggtcgcgggggtgtccgatctgatttcagcaaaactactgcagtaagaa

SEQ ID NO: 4336 - DNA, 152 bp, synthetic construct
  source 1..152: mol_type = other DNA
aatgttgttgatgcaaccataaagtgatatttaataattatttataatcagcaaaggccaacaccccaccaacgcgcggtcgcgagacaccccaccaacgcctggtcgcgggggtgtccgatctgatttcagcaaaactactgcagtaagaa

SEQ ID NO: 4337 - DNA, 152 bp, synthetic construct
  source 1..152: mol_type = other DNA
aatgttgttgatgcaaccataaagtgatatttaataattatttataatcagcacaggccaacaccccaccaacgcgcggtcgcgagacaccccaccaacgcctggtcgcgggggtgtccgatctgatttcagcaaaactactgcagtaagaa

SEQ ID NO: 4338 - DNA, 152 bp, synthetic construct
  source 1..152: mol_type = other DNA
aatgttgttgatgcaaccataaagtgatatttaataattatttataatcagcccaggccaacaccccaccaacgcgcggtcgcgagacaccccaccaacgcctggtcgcgggggtgtccgatctgatttcagcaaaactactgcagtaagaa

SEQ ID NO: 4339 - DNA, 152 bp, synthetic construct
  source 1..152: mol_type = other DNA
aatgttgttgatgcaaccataaagtgatatttaataattatttataatcagaccaggccaacaccccaccaacgcgcggtcgcgagacaccccaccaacgcctggtcgcgggggtgtccgatctgatttcagcaaaactactgcagtaagaa

SEQ ID NO: 4340 - DNA, 152 bp, synthetic construct
  source 1..152: mol_type = other DNA
aatgttgttgatgcaaccataaagtgatatttaataattatttataatcataccaggccaacaccccaccaacgcgcggtcgcgagacaccccaccaacgcctggtcgcgggggtgtccgatctgatttcagcaaaactactgcagtaagaa

SEQ ID NO: 4341 - DNA, 152 bp, synthetic construct
  source 1..152: mol_type = other DNA
aatgttgttgatgcaaccataaagtgatatttaataattatttataatcctaccaggccaacaccccaccaacgcgcggtcgcgagacaccccaccaacgcctggtcgcgggggtgtccgatctgatttcagcaaaactactgcagtaagaa

SEQ ID NO: 4342 - DNA, 152 bp, synthetic construct
  source 1..152: mol_type = other DNA
aatgttgttgatgcaaccataaagtgatatttaataattatttataatactaccaggccaacaccccaccaacgcgcggtcgcgagacaccccaccaacgcctggtcgcgggggtgtccgatctgatttcagcaaaactactgcagtaagaa

SEQ ID NO: 4343 - DNA, 152 bp, synthetic construct
  source 1..152: mol_type = other DNA
aatgttgttgatgcaaccataaagtgatatttaataattatttataagactaccaggccaacaccccaccaacgcgcggtcgcgagacaccccaccaacgcctggtcgcgggggtgtccgatctgatttcagcaaaactactgcagtaagaa

SEQ ID NO: 4344 - DNA, 152 bp, synthetic construct
  source 1..152: mol_type = other DNA
aatgttgttgatgcaaccataaagtgatatttaataattatttatacgactaccaggccaacaccccaccaacgcgcggtcgcgagacaccccaccaacgcctggtcgcgggggtgtccgatctgatttcagcaaaactactgcagtaagaa

SEQ ID NO: 4345 - DNA, 152 bp, synthetic construct
  source 1..152: mol_type = other DNA
aatgttgttgatgcaaccataaagtgatatttaataattatttatccgactaccaggccaacaccccaccaacgcgcggtcgcgagacaccccaccaacgcctggtcgcgggggtgtccgatctgatttcagcaaaactactgcagtaagaa

SEQ ID NO: 4346 - DNA, 152 bp, synthetic construct
  source 1..152: mol_type = other DNA
aatgttgttgatgcaaccataaagtgatatttaataattatttagccgactaccaggccaacaccccaccaacgcgcggtcgcgagacaccccaccaacgcctggtcgcgggggtgtccgatctgatttcagcaaaactactgcagtaagaa

SEQ ID NO: 4347 - DNA, 152 bp, synthetic construct
  source 1..152: mol_type = other DNA
aatgttgttgatgcaaccataaagtgatatttaataattatttcgccgactaccaggccaacaccccaccaacgcgcggtcgcgagacaccccaccaacgcctggtcgcgggggtgtccgatctgatttcagcaaaactactgcagtaagaa

SEQ ID NO: 4348 - DNA, 152 bp, synthetic construct
  source 1..152: mol_type = other DNA
aatgttgttgatgcaaccataaagtgatatttaataattattgcgccgactaccaggccaacaccccaccaacgcgcggtcgcgagacaccccaccaacgcctggtcgcgggggtgtccgatctgatttcagcaaaactactgcagtaagaa

SEQ ID NO: 4349 - DNA, 152 bp, synthetic construct
  source 1..152: mol_type = other DNA
aatgttgttgatgcaaccataaagtgatatttaataattatggcgccgactaccaggccaacaccccaccaacgcgcggtcgcgagacaccccaccaacgcctggtcgcgggggtgtccgatctgatttcagcaaaactactgcagtaagaa

SEQ ID NO: 4350 - DNA, 152 bp, synthetic construct
  source 1..152: mol_type = other DNA
aatgttgttgatgcaaccataaagtgatatttaataattagggcgccgactaccaggccaacaccccaccaacgcgcggtcgcgagacaccccaccaacgcctggtcgcgggggtgtccgatctgatttcagcaaaactactgcagtaagaa

SEQ ID NO: 4351 - DNA, 152 bp, synthetic construct
  source 1..152: mol_type = other DNA
aatgttgttgatgcaaccataaagtgatatttaataattcgggcgccgactaccaggccaacaccccaccaacgcgcggtcgcgagacaccccaccaacgcctggtcgcgggggtgtccgatctgatttcagcaaaactactgcagtaagaa

SEQ ID NO: 4352 - DNA, 152 bp, synthetic construct
  source 1..152: mol_type = other DNA
aatgttgttgatgcaaccataaagtgatatttaataatgcgggcgccgactaccaggccaacaccccaccaacgcgcggtcgcgagacaccccaccaacgcctggtcgcgggggtgtccgatctgatttcagcaaaactactgcagtaagaa

SEQ ID NO: 4353 - DNA, 152 bp, synthetic construct
  source 1..152: mol_type = other DNA
aatgttgttgatgcaaccataaagtgatatttaataaggcgggcgccgactaccaggccaacaccccaccaacgcgcggtcgcgagacaccccaccaacgcctggtcgcgggggtgtccgatctgatttcagcaaaactactgcagtaagaa

SEQ ID NO: 4354 - DNA, 152 bp, synthetic construct
  source 1..152: mol_type = other DNA
aatgttgttgatgcaaccataaagtgatatttaatacggcgggcgccgactaccaggccaacaccccaccaacgcgcggtcgcgagacaccccaccaacgcctggtcgcgggggtgtccgatctgatttcagcaaaactactgcagtaagaa

SEQ ID NO: 4355 - DNA, 152 bp, synthetic construct
  source 1..152: mol_type = other DNA
aatgttgttgatgcaaccataaagtgatatttaatccggcgggcgccgactaccaggccaacaccccaccaacgcgcggtcgcgagacaccccaccaacgcctggtcgcgggggtgtccgatctgatttcagcaaaactactgcagtaagaa

SEQ ID NO: 4356 - DNA, 152 bp, synthetic construct
  source 1..152: mol_type = other DNA
aatgttgttgatgcaaccataaagtgatatttaagccggcgggcgccgactaccaggccaacaccccaccaacgcgcggtcgcgagacaccccaccaacgcctggtcgcgggggtgtccgatctgatttcagcaaaactactgcagtaagaa

SEQ ID NO: 4357 - DNA, 152 bp, synthetic construct
  source 1..152: mol_type = other DNA
aatgttgttgatgcaaccataaagtgatatttacgccggcgggcgccgactaccaggccaacaccccaccaacgcgcggtcgcgagacaccccaccaacgcctggtcgcgggggtgtccgatctgatttcagcaaaactactgcagtaagaa

SEQ ID NO: 4358 - DNA, 152 bp, synthetic construct
  source 1..152: mol_type = other DNA
aatgttgttgatgcaaccataaagtgatatttccgccggcgggcgccgactaccaggccaacaccccaccaacgcgcggtcgcgagacaccccaccaacgcctggtcgcgggggtgtccgatctgatttcagcaaaactactgcagtaagaa

SEQ ID NO: 4359 - DNA, 152 bp, synthetic construct
  source 1..152: mol_type = other DNA
aatgttgttgatgcaaccataaagtgatattgccgccggcgggcgccgactaccaggccaacaccccaccaacgcgcggtcgcgagacaccccaccaacgcctggtcgcgggggtgtccgatctgatttcagcaaaactactgcagtaagaa

SEQ ID NO: 4360 - DNA, 152 bp, synthetic construct
  source 1..152: mol_type = other DNA
aatgttgttgatgcaaccataaagtgatatggccgccggcgggcgccgactaccaggccaacaccccaccaacgcgcggtcgcgagacaccccaccaacgcctggtcgcgggggtgtccgatctgatttcagcaaaactactgcagtaagaa

SEQ ID NO: 4361 - DNA, 152 bp, synthetic construct
  source 1..152: mol_type = other DNA
aatgttgttgatgcaaccataaagtgatagggccgccggcgggcgccgactaccaggccaacaccccaccaacgcgcggtcgcgagacaccccaccaacgcctggtcgcgggggtgtccgatctgatttcagcaaaactactgcagtaagaa

SEQ ID NO: 4362 - DNA, 152 bp, synthetic construct
  source 1..152: mol_type = other DNA
aatgttgttgatgcaaccataaagtgatcgggccgccggcgggcgccgactaccaggccaacaccccaccaacgcgcggtcgcgagacaccccaccaacgcctggtcgcgggggtgtccgatctgatttcagcaaaactactgcagtaagaa

SEQ ID NO: 4363 - DNA, 152 bp, synthetic construct
  source 1..152: mol_type = other DNA
aatgttgttgatgcaaccataaagtgagcgggccgccggcgggcgccgactaccaggccaacaccccaccaacgcgcggtcgcgagacaccccaccaacgcctggtcgcgggggtgtccgatctgatttcagcaaaactactgcagtaagaa

SEQ ID NO: 4364 - DNA, 152 bp, synthetic construct
  source 1..152: mol_type = other DNA
aatgttgttgatgcaaccataaagtgcgcgggccgccggcgggcgccgactaccaggccaacaccccaccaacgcgcggtcgcgagacaccccaccaacgcctggtcgcgggggtgtccgatctgatttcagcaaaactactgcagtaagaa

SEQ ID NO: 4365 - DNA, 152 bp, synthetic construct
  source 1..152: mol_type = other DNA
aatgttgttgatgcaaccataaagttcgcgggccgccggcgggcgccgactaccaggccaacaccccaccaacgcgcggtcgcgagacaccccaccaacgcctggtcgcgggggtgtccgatctgatttcagcaaaactactgcagtaagaa

SEQ ID NO: 4366 - DNA, 152 bp, synthetic construct
  source 1..152: mol_type = other DNA
aatgttgttgatgcaaccataaaggtcgcgggccgccggcgggcgccgactaccaggccaacaccccaccaacgcgcggtcgcgagacaccccaccaacgcctggtcgcgggggtgtccgatctgatttcagcaaaactactgcagtaagaa

SEQ ID NO: 4367 - DNA, 152 bp, synthetic construct
  source 1..152: mol_type = other DNA
aatgttgttgatgcaaccataaatgtcgcgggccgccggcgggcgccgactaccaggccaacaccccaccaacgcgcggtcgcgagacaccccaccaacgcctggtcgcgggggtgtccgatctgatttcagcaaaactactgcagtaagaa

SEQ ID NO: 4368 - DNA, 152 bp, synthetic construct
  source 1..152: mol_type = other DNA
aatgttgttgatgcaaccataactgtcgcgggccgccggcgggcgccgactaccaggccaacaccccaccaacgcgcggtcgcgagacaccccaccaacgcctggtcgcgggggtgtccgatctgatttcagcaaaactactgcagtaagaa

SEQ ID NO: 4369 - DNA, 152 bp, synthetic construct
  source 1..152: mol_type = other DNA
aatgttgttgatgcaaccatacctgtcgcgggccgccggcgggcgccgactaccaggccaacaccccaccaacgcgcggtcgcgagacaccccaccaacgcctggtcgcgggggtgtccgatctgatttcagcaaaactactgcagtaagaa

SEQ ID NO: 4370 - DNA, 152 bp, synthetic construct
  source 1..152: mol_type = other DNA
aatgttgttgatgcaaccatccctgtcgcgggccgccggcgggcgccgactaccaggccaacaccccaccaacgcgcggtcgcgagacaccccaccaacgcctggtcgcgggggtgtccgatctgatttcagcaaaactactgcagtaagaa

SEQ ID NO: 4371 - DNA, 152 bp, synthetic construct
  source 1..152: mol_type = other DNA
aatgttgttgatgcaaccagccctgtcgcgggccgccggcgggcgccgactaccaggccaacaccccaccaacgcgcggtcgcgagacaccccaccaacgcctggtcgcgggggtgtccgatctgatttcagcaaaactactgcagtaagaa

SEQ ID NO: 4372 - DNA, 152 bp, synthetic construct
  source 1..152: mol_type = other DNA
aatgttgttgatgcaacccgccctgtcgcgggccgccggcgggcgccgactaccaggccaacaccccaccaacgcgcggtcgcgagacaccccaccaacgcctggtcgcgggggtgtccgatctgatttcagcaaaactactgcagtaagaa

SEQ ID NO: 4373 - DNA, 152 bp, synthetic construct
  source 1..152: mol_type = other DNA
aatgttgttgatgcaacacgccctgtcgcgggccgccggcgggcgccgactaccaggccaacaccccaccaacgcgcggtcgcgagacaccccaccaacgcctggtcgcgggggtgtccgatctgatttcagcaaaactactgcagtaagaa

SEQ ID NO: 4374 - DNA, 152 bp, synthetic construct
  source 1..152: mol_type = other DNA
aatgttgttgatgcaaaacgccctgtcgcgggccgccggcgggcgccgactaccaggccaacaccccaccaacgcgcggtcgcgagacaccccaccaacgcctggtcgcgggggtgtccgatctgatttcagcaaaactactgcagtaagaa

SEQ ID NO: 4375 - DNA, 152 bp, synthetic construct
  source 1..152: mol_type = other DNA
aatgttgttgatgcacaacgccctgtcgcgggccgccggcgggcgccgactaccaggccaacaccccaccaacgcgcggtcgcgagacaccccaccaacgcctggtcgcgggggtgtccgatctgatttcagcaaaactactgcagtaagaa

SEQ ID NO: 4376 - DNA, 152 bp, synthetic construct
  source 1..152: mol_type = other DNA
aatgttgttgatgcccaacgccctgtcgcgggccgccggcgggcgccgactaccaggccaacaccccaccaacgcgcggtcgcgagacaccccaccaacgcctggtcgcgggggtgtccgatctgatttcagcaaaactactgcagtaagaa

SEQ ID NO: 4377 - DNA, 152 bp, synthetic construct
  source 1..152: mol_type = other DNA
aatgttgttgatgaccaacgccctgtcgcgggccgccggcgggcgccgactaccaggccaacaccccaccaacgcgcggtcgcgagacaccccaccaacgcctggtcgcgggggtgtccgatctgatttcagcaaaactactgcagtaagaa

SEQ ID NO: 4378 - DNA, 152 bp, synthetic construct
  source 1..152: mol_type = other DNA
aatgttgttgatgcaaccataaaatgataattaataattatttataatcagcaacttaaccacaaaacaaccataaaatgataattaacaaaacaaccataaaatgataattatgtgaatcgagtatttcagcaaaactactgcagtaagaa

SEQ ID NO: 4379 - DNA, 152 bp, synthetic construct
  source 1..152: mol_type = other DNA
aatgttgttgatgcaaccataaaatgataattaataattatttataatcagcaacttaaccacaaaacaaccataaaatgataattaacaaaacacccataaattgataattatgtgaatcgagtatttcagcaaaactactgcagtaagaa

SEQ ID NO: 4380 - DNA, 152 bp, synthetic construct
  source 1..152: mol_type = other DNA
aatgttgttgatgcaaccataaaatgataattaataattatttataatcagcaacttaaccacaaaacaaccataaaatgataattaacaaaacacccataaattgatattgctgtgaatcgagtatttcagcaaaactactgcagtaagaa

SEQ ID NO: 4381 - DNA, 152 bp, synthetic construct
  source 1..152: mol_type = other DNA
aatgttgttgatgcaaccataaaatgataattaataattatttataatcagcaacttaaccacaaaacaaccataaaatgataattaacaaaacaaccataagttgatatttttgtgaatcgagtatttcagcaaaactactgcagtaagaa

SEQ ID NO: 4382 - DNA, 152 bp, synthetic construct
  source 1..152: mol_type = other DNA
aatgttgttgatgcaaccataaaatgataattaataattatttataatcagcaacttaaccacaaaacaaccataaaatgataattaacaaaacaaccatatattgatatctctgtgaatcgagtatttcagcaaaactactgcagtaagaa

SEQ ID NO: 4383 - DNA, 152 bp, synthetic construct
  source 1..152: mol_type = other DNA
aatgttgttgatgcaaccataaaatgataattaataattatttataatcagcaacttaaccacaaaacaaccataaaatgataattaacaaaacaaccataaagtgatatttatgtgaatcgagtatttcagcaaaactactgcagtaagaa

SEQ ID NO: 4384 - DNA, 152 bp, synthetic construct
  source 1..152: mol_type = other DNA
aatgttgttgatgcaaccataaaatgataattaataattatttataatcagcaacttaaccacaaaacacccataaattgataattaacaaaacaaccataaaatgataattatgtgaatcgagtatttcagcaaaactactgcagtaagaa

SEQ ID NO: 4385 - DNA, 152 bp, synthetic construct
  source 1..152: mol_type = other DNA
aatgttgttgatgcaaccataaaatgataattaataattatttataatcagcaacttaaccacaaaacacccataaattgataattaacaaaacacccataaattgataattatgtgaatcgagtatttcagcaaaactactgcagtaagaa

SEQ ID NO: 4386 - DNA, 152 bp, synthetic construct
  source 1..152: mol_type = other DNA
aatgttgttgatgcaaccataaaatgataattaataattatttataatcagcaacttaaccacaaaacacccataaattgataattaacaaaacacccataaattgatattgctgtgaatcgagtatttcagcaaaactactgcagtaagaa

SEQ ID NO: 4387 - DNA, 152 bp, synthetic construct
  source 1..152: mol_type = other DNA
aatgttgttgatgcaaccataaaatgataattaataattatttataatcagcaacttaaccacaaaacacccataaattgataattaacaaaacaaccataagttgatatttttgtgaatcgagtatttcagcaaaactactgcagtaagaa

SEQ ID NO: 4388 - DNA, 152 bp, synthetic construct
  source 1..152: mol_type = other DNA
aatgttgttgatgcaaccataaaatgataattaataattatttataatcagcaacttaaccacaaaacacccataaattgataattaacaaaacaaccatatattgatatctctgtgaatcgagtatttcagcaaaactactgcagtaagaa

SEQ ID NO: 4389 - DNA, 152 bp, synthetic construct
  source 1..152: mol_type = other DNA
aatgttgttgatgcaaccataaaatgataattaataattatttataatcagcaacttaaccacaaaacacccataaattgataattaacaaaacaaccataaagtgatatttatgtgaatcgagtatttcagcaaaactactgcagtaagaa

SEQ ID NO: 4390 - DNA, 152 bp, synthetic construct
  source 1..152: mol_type = other DNA
aatgttgttgatgcaaccataaaatgataattaataattatttataatcagcaacttaaccacaaaacacccataaattgatattgcacaaaacaaccataaaatgataattatgtgaatcgagtatttcagcaaaactactgcagtaagaa

SEQ ID NO: 4391 - DNA, 152 bp, synthetic construct
  source 1..152: mol_type = other DNA
aatgttgttgatgcaaccataaaatgataattaataattatttataatcagcaacttaaccacaaaacacccataaattgatattgcacaaaacacccataaattgataattatgtgaatcgagtatttcagcaaaactactgcagtaagaa

SEQ ID NO: 4392 - DNA, 152 bp, synthetic construct
  source 1..152: mol_type = other DNA
aatgttgttgatgcaaccataaaatgataattaataattatttataatcagcaacttaaccacaaaacacccataaattgatattgcacaaaacacccataaattgatattgctgtgaatcgagtatttcagcaaaactactgcagtaagaa

SEQ ID NO: 4393 - DNA, 152 bp, synthetic construct
  source 1..152: mol_type = other DNA
aatgttgttgatgcaaccataaaatgataattaataattatttataatcagcaacttaaccacaaaacacccataaattgatattgcacaaaacaaccataagttgatatttttgtgaatcgagtatttcagcaaaactactgcagtaagaa

SEQ ID NO: 4394 - DNA, 152 bp, synthetic construct
  source 1..152: mol_type = other DNA
aatgttgttgatgcaaccataaaatgataattaataattatttataatcagcaacttaaccacaaaacacccataaattgatattgcacaaaacaaccatatattgatatctctgtgaatcgagtatttcagcaaaactactgcagtaagaa

SEQ ID NO: 4395 - DNA, 152 bp, synthetic construct
  source 1..152: mol_type = other DNA
aatgttgttgatgcaaccataaaatgataattaataattatttataatcagcaacttaaccacaaaacacccataaattgatattgcacaaaacaaccataaagtgatatttatgtgaatcgagtatttcagcaaaactactgcagtaagaa

SEQ ID NO: 4396 - DNA, 152 bp, synthetic construct
  source 1..152: mol_type = other DNA
aatgttgttgatgcaaccataaaatgataattaataattatttataatcagcaacttaaccacaaaacaaccataagttgatattttacaaaacaaccataaaatgataattatgtgaatcgagtatttcagcaaaactactgcagtaagaa

SEQ ID NO: 4397 - DNA, 152 bp, synthetic construct
  source 1..152: mol_type = other DNA
aatgttgttgatgcaaccataaaatgataattaataattatttataatcagcaacttaaccacaaaacaaccataagttgatattttacaaaacacccataaattgataattatgtgaatcgagtatttcagcaaaactactgcagtaagaa

SEQ ID NO: 4398 - DNA, 152 bp, synthetic construct
  source 1..152: mol_type = other DNA
aatgttgttgatgcaaccataaaatgataattaataattatttataatcagcaacttaaccacaaaacaaccataagttgatattttacaaaacacccataaattgatattgctgtgaatcgagtatttcagcaaaactactgcagtaagaa

SEQ ID NO: 4399 - DNA, 152 bp, synthetic construct
  source 1..152: mol_type = other DNA
aatgttgttgatgcaaccataaaatgataattaataattatttataatcagcaacttaaccacaaaacaaccataagttgatattttacaaaacaaccataagttgatatttttgtgaatcgagtatttcagcaaaactactgcagtaagaa

SEQ ID NO: 4400 - DNA, 152 bp, synthetic construct
  source 1..152: mol_type = other DNA
aatgttgttgatgcaaccataaaatgataattaataattatttataatcagcaacttaaccacaaaacaaccataagttgatattttacaaaacaaccatatattgatatctctgtgaatcgagtatttcagcaaaactactgcagtaagaa

SEQ ID NO: 4401 - DNA, 152 bp, synthetic construct
  source 1..152: mol_type = other DNA
aatgttgttgatgcaaccataaaatgataattaataattatttataatcagcaacttaaccacaaaacaaccataagttgatattttacaaaacaaccataaagtgatatttatgtgaatcgagtatttcagcaaaactactgcagtaagaa

SEQ ID NO: 4402 - DNA, 152 bp, synthetic construct
  source 1..152: mol_type = other DNA
aatgttgttgatgcaaccataaaatgataattaataattatttataatcagcaacttaaccacaaaacaaccatatattgatatctcacaaaacaaccataaaatgataattatgtgaatcgagtatttcagcaaaactactgcagtaagaa

SEQ ID NO: 4403 - DNA, 152 bp, synthetic construct
  source 1..152: mol_type = other DNA
aatgttgttgatgcaaccataaaatgataattaataattatttataatcagcaacttaaccacaaaacaaccatatattgatatctcacaaaacacccataaattgataattatgtgaatcgagtatttcagcaaaactactgcagtaagaa

SEQ ID NO: 4404 - DNA, 152 bp, synthetic construct
  source 1..152: mol_type = other DNA
aatgttgttgatgcaaccataaaatgataattaataattatttataatcagcaacttaaccacaaaacaaccatatattgatatctcacaaaacacccataaattgatattgctgtgaatcgagtatttcagcaaaactactgcagtaagaa

SEQ ID NO: 4405 - DNA, 152 bp, synthetic construct
  source 1..152: mol_type = other DNA
aatgttgttgatgcaaccataaaatgataattaataattatttataatcagcaacttaaccacaaaacaaccatatattgatatctcacaaaacaaccataagttgatatttttgtgaatcgagtatttcagcaaaactactgcagtaagaa

SEQ ID NO: 4406 - DNA, 152 bp, synthetic construct
  source 1..152: mol_type = other DNA
aatgttgttgatgcaaccataaaatgataattaataattatttataatcagcaacttaaccacaaaacaaccatatattgatatctcacaaaacaaccatatattgatatctctgtgaatcgagtatttcagcaaaactactgcagtaagaa

SEQ ID NO: 4407 - DNA, 152 bp, synthetic construct
  source 1..152: mol_type = other DNA
aatgttgttgatgcaaccataaaatgataattaataattatttataatcagcaacttaaccacaaaacaaccatatattgatatctcacaaaacaaccataaagtgatatttatgtgaatcgagtatttcagcaaaactactgcagtaagaa

SEQ ID NO: 4408 - DNA, 152 bp, synthetic construct
  source 1..152: mol_type = other DNA
aatgttgttgatgcaaccataaaatgataattaataattatttataatcagcaacttaaccacaaaacaaccataaagtgatatttaacaaaacaaccataaaatgataattatgtgaatcgagtatttcagcaaaactactgcagtaagaa

SEQ ID NO: 4409 - DNA, 152 bp, synthetic construct
  source 1..152: mol_type = other DNA
aatgttgttgatgcaaccataaaatgataattaataattatttataatcagcaacttaaccacaaaacaaccataaagtgatatttaacaaaacacccataaattgataattatgtgaatcgagtatttcagcaaaactactgcagtaagaa

SEQ ID NO: 4410 - DNA, 152 bp, synthetic construct
  source 1..152: mol_type = other DNA
aatgttgttgatgcaaccataaaatgataattaataattatttataatcagcaacttaaccacaaaacaaccataaagtgatatttaacaaaacacccataaattgatattgctgtgaatcgagtatttcagcaaaactactgcagtaagaa

SEQ ID NO: 4411 - DNA, 152 bp, synthetic construct
  source 1..152: mol_type = other DNA
aatgttgttgatgcaaccataaaatgataattaataattatttataatcagcaacttaaccacaaaacaaccataaagtgatatttaacaaaacaaccataagttgatatttttgtgaatcgagtatttcagcaaaactactgcagtaagaa

SEQ ID NO: 4412 - DNA, 152 bp, synthetic construct
  source 1..152: mol_type = other DNA
aatgttgttgatgcaaccataaaatgataattaataattatttataatcagcaacttaaccacaaaacaaccataaagtgatatttaacaaaacaaccatatattgatatctctgtgaatcgagtatttcagcaaaactactgcagtaagaa

SEQ ID NO: 4413 - DNA, 152 bp, synthetic construct
  source 1..152: mol_type = other DNA
aatgttgttgatgcaaccataaaatgataattaataattatttataatcagcaacttaaccacaaaacaaccataaagtgatatttaacaaaacaaccataaagtgatatttatgtgaatcgagtatttcagcaaaactactgcagtaagaa

SEQ ID NO: 4414 - DNA, 152 bp, synthetic construct
  source 1..152: mol_type = other DNA
aatgttgttgatgcacccataaattgataattaataattatttataatcagcaacttaaccacaaaacaaccataaaatgataattaacaaaacaaccataaaatgataattatgtgaatcgagtatttcagcaaaactactgcagtaagaa

SEQ ID NO: 4415 - DNA, 152 bp, synthetic construct
  source 1..152: mol_type = other DNA
aatgttgttgatgcacccataaattgataattaataattatttataatcagcaacttaaccacaaaacaaccataaaatgataattaacaaaacacccataaattgataattatgtgaatcgagtatttcagcaaaactactgcagtaagaa

SEQ ID NO: 4416 - DNA, 152 bp, synthetic construct
  source 1..152: mol_type = other DNA
aatgttgttgatgcacccataaattgataattaataattatttataatcagcaacttaaccacaaaacaaccataaaatgataattaacaaaacacccataaattgatattgctgtgaatcgagtatttcagcaaaactactgcagtaagaa

SEQ ID NO: 4417 - DNA, 152 bp, synthetic construct
  source 1..152: mol_type = other DNA
aatgttgttgatgcacccataaattgataattaataattatttataatcagcaacttaaccacaaaacaaccataaaatgataattaacaaaacaaccataagttgatatttttgtgaatcgagtatttcagcaaaactactgcagtaagaa

SEQ ID NO: 4418 - DNA, 152 bp, synthetic construct
  source 1..152: mol_type = other DNA
aatgttgttgatgcacccataaattgataattaataattatttataatcagcaacttaaccacaaaacaaccataaaatgataattaacaaaacaaccatatattgatatctctgtgaatcgagtatttcagcaaaactactgcagtaagaa

SEQ ID NO: 4419 - DNA, 152 bp, synthetic construct
  source 1..152: mol_type = other DNA
aatgttgttgatgcacccataaattgataattaataattatttataatcagcaacttaaccacaaaacaaccataaaatgataattaacaaaacaaccataaagtgatatttatgtgaatcgagtatttcagcaaaactactgcagtaagaa

SEQ ID NO: 4420 - DNA, 152 bp, synthetic construct
  source 1..152: mol_type = other DNA
aatgttgttgatgcacccataaattgataattaataattatttataatcagcaacttaaccacaaaacacccataaattgataattaacaaaacaaccataaaatgataattatgtgaatcgagtatttcagcaaaactactgcagtaagaa

SEQ ID NO: 4421 - DNA, 152 bp, synthetic construct
  source 1..152: mol_type = other DNA
aatgttgttgatgcacccataaattgataattaataattatttataatcagcaacttaaccacaaaacacccataaattgataattaacaaaacacccataaattgataattatgtgaatcgagtatttcagcaaaactactgcagtaagaa

SEQ ID NO: 4422 - DNA, 152 bp, synthetic construct
  source 1..152: mol_type = other DNA
aatgttgttgatgcacccataaattgataattaataattatttataatcagcaacttaaccacaaaacacccataaattgataattaacaaaacacccataaattgatattgctgtgaatcgagtatttcagcaaaactactgcagtaagaa

SEQ ID NO: 4423 - DNA, 152 bp, synthetic construct
  source 1..152: mol_type = other DNA
aatgttgttgatgcacccataaattgataattaataattatttataatcagcaacttaaccacaaaacacccataaattgataattaacaaaacaaccataagttgatatttttgtgaatcgagtatttcagcaaaactactgcagtaagaa

SEQ ID NO: 4424 - DNA, 152 bp, synthetic construct
  source 1..152: mol_type = other DNA
aatgttgttgatgcacccataaattgataattaataattatttataatcagcaacttaaccacaaaacacccataaattgataattaacaaaacaaccatatattgatatctctgtgaatcgagtatttcagcaaaactactgcagtaagaa

SEQ ID NO: 4425 - DNA, 152 bp, synthetic construct
  source 1..152: mol_type = other DNA
aatgttgttgatgcacccataaattgataattaataattatttataatcagcaacttaaccacaaaacacccataaattgataattaacaaaacaaccataaagtgatatttatgtgaatcgagtatttcagcaaaactactgcagtaagaa

SEQ ID NO: 4426 - DNA, 152 bp, synthetic construct
  source 1..152: mol_type = other DNA
aatgttgttgatgcacccataaattgataattaataattatttataatcagcaacttaaccacaaaacacccataaattgatattgcacaaaacaaccataaaatgataattatgtgaatcgagtatttcagcaaaactactgcagtaagaa

SEQ ID NO: 4427 - DNA, 152 bp, synthetic construct
  source 1..152: mol_type = other DNA
aatgttgttgatgcacccataaattgataattaataattatttataatcagcaacttaaccacaaaacacccataaattgatattgcacaaaacacccataaattgataattatgtgaatcgagtatttcagcaaaactactgcagtaagaa

SEQ ID NO: 4428 - DNA, 152 bp, synthetic construct
  source 1..152: mol_type = other DNA
aatgttgttgatgcacccataaattgataattaataattatttataatcagcaacttaaccacaaaacacccataaattgatattgcacaaaacacccataaattgatattgctgtgaatcgagtatttcagcaaaactactgcagtaagaa

SEQ ID NO: 4429 - DNA, 152 bp, synthetic construct
  source 1..152: mol_type = other DNA
aatgttgttgatgcacccataaattgataattaataattatttataatcagcaacttaaccacaaaacacccataaattgatattgcacaaaacaaccataagttgatatttttgtgaatcgagtatttcagcaaaactactgcagtaagaa

SEQ ID NO: 4430 - DNA, 152 bp, synthetic construct
  source 1..152: mol_type = other DNA
aatgttgttgatgcacccataaattgataattaataattatttataatcagcaacttaaccacaaaacacccataaattgatattgcacaaaacaaccatatattgatatctctgtgaatcgagtatttcagcaaaactactgcagtaagaa

SEQ ID NO: 4431 - DNA, 152 bp, synthetic construct
  source 1..152: mol_type = other DNA
aatgttgttgatgcacccataaattgataattaataattatttataatcagcaacttaaccacaaaacacccataaattgatattgcacaaaacaaccataaagtgatatttatgtgaatcgagtatttcagcaaaactactgcagtaagaa

SEQ ID NO: 4432 - DNA, 152 bp, synthetic construct
  source 1..152: mol_type = other DNA
aatgttgttgatgcacccataaattgataattaataattatttataatcagcaacttaaccacaaaacaaccataagttgatattttacaaaacaaccataaaatgataattatgtgaatcgagtatttcagcaaaactactgcagtaagaa

SEQ ID NO: 4433 - DNA, 152 bp, synthetic construct
  source 1..152: mol_type = other DNA
aatgttgttgatgcacccataaattgataattaataattatttataatcagcaacttaaccacaaaacaaccataagttgatattttacaaaacacccataaattgataattatgtgaatcgagtatttcagcaaaactactgcagtaagaa

SEQ ID NO: 4434 - DNA, 152 bp, synthetic construct
  source 1..152: mol_type = other DNA
aatgttgttgatgcacccataaattgataattaataattatttataatcagcaacttaaccacaaaacaaccataagttgatattttacaaaacacccataaattgatattgctgtgaatcgagtatttcagcaaaactactgcagtaagaa

SEQ ID NO: 4435 - DNA, 152 bp, synthetic construct
  source 1..152: mol_type = other DNA
aatgttgttgatgcacccataaattgataattaataattatttataatcagcaacttaaccacaaaacaaccataagttgatattttacaaaacaaccataagttgatatttttgtgaatcgagtatttcagcaaaactactgcagtaagaa

SEQ ID NO: 4436 - DNA, 152 bp, synthetic construct
  source 1..152: mol_type = other DNA
aatgttgttgatgcacccataaattgataattaataattatttataatcagcaacttaaccacaaaacaaccataagttgatattttacaaaacaaccatatattgatatctctgtgaatcgagtatttcagcaaaactactgcagtaagaa

SEQ ID NO: 4437 - DNA, 152 bp, synthetic construct
  source 1..152: mol_type = other DNA
aatgttgttgatgcacccataaattgataattaataattatttataatcagcaacttaaccacaaaacaaccataagttgatattttacaaaacaaccataaagtgatatttatgtgaatcgagtatttcagcaaaactactgcagtaagaa

SEQ ID NO: 4438 - DNA, 152 bp, synthetic construct
  source 1..152: mol_type = other DNA
aatgttgttgatgcacccataaattgataattaataattatttataatcagcaacttaaccacaaaacaaccatatattgatatctcacaaaacaaccataaaatgataattatgtgaatcgagtatttcagcaaaactactgcagtaagaa

SEQ ID NO: 4439 - DNA, 152 bp, synthetic construct
  source 1..152: mol_type = other DNA
aatgttgttgatgcacccataaattgataattaataattatttataatcagcaacttaaccacaaaacaaccatatattgatatctcacaaaacacccataaattgataattatgtgaatcgagtatttcagcaaaactactgcagtaagaa

SEQ ID NO: 4440 - DNA, 152 bp, synthetic construct
  source 1..152: mol_type = other DNA
aatgttgttgatgcacccataaattgataattaataattatttataatcagcaacttaaccacaaaacaaccatatattgatatctcacaaaacacccataaattgatattgctgtgaatcgagtatttcagcaaaactactgcagtaagaa

SEQ ID NO: 4441 - DNA, 152 bp, synthetic construct
  source 1..152: mol_type = other DNA
aatgttgttgatgcacccataaattgataattaataattatttataatcagcaacttaaccacaaaacaaccatatattgatatctcacaaaacaaccataagttgatatttttgtgaatcgagtatttcagcaaaactactgcagtaagaa

SEQ ID NO: 4442 - DNA, 152 bp, synthetic construct
  source 1..152: mol_type = other DNA
aatgttgttgatgcacccataaattgataattaataattatttataatcagcaacttaaccacaaaacaaccatatattgatatctcacaaaacaaccatatattgatatctctgtgaatcgagtatttcagcaaaactactgcagtaagaa

SEQ ID NO: 4443 - DNA, 152 bp, synthetic construct
  source 1..152: mol_type = other DNA
aatgttgttgatgcacccataaattgataattaataattatttataatcagcaacttaaccacaaaacaaccatatattgatatctcacaaaacaaccataaagtgatatttatgtgaatcgagtatttcagcaaaactactgcagtaagaa

SEQ ID NO: 4444 - DNA, 152 bp, synthetic construct
  source 1..152: mol_type = other DNA
aatgttgttgatgcacccataaattgataattaataattatttataatcagcaacttaaccacaaaacaaccataaagtgatatttaacaaaacaaccataaaatgataattatgtgaatcgagtatttcagcaaaactactgcagtaagaa

SEQ ID NO: 4445 - DNA, 152 bp, synthetic construct
  source 1..152: mol_type = other DNA
aatgttgttgatgcacccataaattgataattaataattatttataatcagcaacttaaccacaaaacaaccataaagtgatatttaacaaaacacccataaattgataattatgtgaatcgagtatttcagcaaaactactgcagtaagaa

SEQ ID NO: 4446 - DNA, 152 bp, synthetic construct
  source 1..152: mol_type = other DNA
aatgttgttgatgcacccataaattgataattaataattatttataatcagcaacttaaccacaaaacaaccataaagtgatatttaacaaaacacccataaattgatattgctgtgaatcgagtatttcagcaaaactactgcagtaagaa

SEQ ID NO: 4447 - DNA, 152 bp, synthetic construct
  source 1..152: mol_type = other DNA
aatgttgttgatgcacccataaattgataattaataattatttataatcagcaacttaaccacaaaacaaccataaagtgatatttaacaaaacaaccataagttgatatttttgtgaatcgagtatttcagcaaaactactgcagtaagaa

SEQ ID NO: 4448 - DNA, 152 bp, synthetic construct
  source 1..152: mol_type = other DNA
aatgttgttgatgcacccataaattgataattaataattatttataatcagcaacttaaccacaaaacaaccataaagtgatatttaacaaaacaaccatatattgatatctctgtgaatcgagtatttcagcaaaactactgcagtaagaa

SEQ ID NO: 4449 - DNA, 152 bp, synthetic construct
  source 1..152: mol_type = other DNA
aatgttgttgatgcacccataaattgataattaataattatttataatcagcaacttaaccacaaaacaaccataaagtgatatttaacaaaacaaccataaagtgatatttatgtgaatcgagtatttcagcaaaactactgcagtaagaa

SEQ ID NO: 4450 - DNA, 152 bp, synthetic construct
  source 1..152: mol_type = other DNA
aatgttgttgatgcacccataaattgatattgcataattatttataatcagcaacttaaccacaaaacaaccataaaatgataattaacaaaacaaccataaaatgataattatgtgaatcgagtatttcagcaaaactactgcagtaagaa

SEQ ID NO: 4451 - DNA, 152 bp, synthetic construct
  source 1..152: mol_type = other DNA
aatgttgttgatgcacccataaattgatattgcataattatttataatcagcaacttaaccacaaaacaaccataaaatgataattaacaaaacacccataaattgataattatgtgaatcgagtatttcagcaaaactactgcagtaagaa

SEQ ID NO: 4452 - DNA, 152 bp, synthetic construct
  source 1..152: mol_type = other DNA
aatgttgttgatgcacccataaattgatattgcataattatttataatcagcaacttaaccacaaaacaaccataaaatgataattaacaaaacacccataaattgatattgctgtgaatcgagtatttcagcaaaactactgcagtaagaa

SEQ ID NO: 4453 - DNA, 152 bp, synthetic construct
  source 1..152: mol_type = other DNA
aatgttgttgatgcacccataaattgatattgcataattatttataatcagcaacttaaccacaaaacaaccataaaatgataattaacaaaacaaccataagttgatatttttgtgaatcgagtatttcagcaaaactactgcagtaagaa

SEQ ID NO: 4454 - DNA, 152 bp, synthetic construct
  source 1..152: mol_type = other DNA
aatgttgttgatgcacccataaattgatattgcataattatttataatcagcaacttaaccacaaaacaaccataaaatgataattaacaaaacaaccatatattgatatctctgtgaatcgagtatttcagcaaaactactgcagtaagaa

SEQ ID NO: 4455 - DNA, 152 bp, synthetic construct
  source 1..152: mol_type = other DNA
aatgttgttgatgcacccataaattgatattgcataattatttataatcagcaacttaaccacaaaacaaccataaaatgataattaacaaaacaaccataaagtgatatttatgtgaatcgagtatttcagcaaaactactgcagtaagaa

SEQ ID NO: 4456 - DNA, 152 bp, synthetic construct
  source 1..152: mol_type = other DNA
aatgttgttgatgcacccataaattgatattgcataattatttataatcagcaacttaaccacaaaacacccataaattgataattaacaaaacaaccataaaatgataattatgtgaatcgagtatttcagcaaaactactgcagtaagaa

SEQ ID NO: 4457 - DNA, 152 bp, synthetic construct
  source 1..152: mol_type = other DNA
aatgttgttgatgcacccataaattgatattgcataattatttataatcagcaacttaaccacaaaacacccataaattgataattaacaaaacacccataaattgataattatgtgaatcgagtatttcagcaaaactactgcagtaagaa

SEQ ID NO: 4458 - DNA, 152 bp, synthetic construct
  source 1..152: mol_type = other DNA
aatgttgttgatgcacccataaattgatattgcataattatttataatcagcaacttaaccacaaaacacccataaattgataattaacaaaacacccataaattgatattgctgtgaatcgagtatttcagcaaaactactgcagtaagaa

SEQ ID NO: 4459 - DNA, 152 bp, synthetic construct
  source 1..152: mol_type = other DNA
aatgttgttgatgcacccataaattgatattgcataattatttataatcagcaacttaaccacaaaacacccataaattgataattaacaaaacaaccataagttgatatttttgtgaatcgagtatttcagcaaaactactgcagtaagaa

SEQ ID NO: 4460 - DNA, 152 bp, synthetic construct
  source 1..152: mol_type = other DNA
aatgttgttgatgcacccataaattgatattgcataattatttataatcagcaacttaaccacaaaacacccataaattgataattaacaaaacaaccatatattgatatctctgtgaatcgagtatttcagcaaaactactgcagtaagaa

SEQ ID NO: 4461 - DNA, 152 bp, synthetic construct
  source 1..152: mol_type = other DNA
aatgttgttgatgcacccataaattgatattgcataattatttataatcagcaacttaaccacaaaacacccataaattgataattaacaaaacaaccataaagtgatatttatgtgaatcgagtatttcagcaaaactactgcagtaagaa

SEQ ID NO: 4462 - DNA, 152 bp, synthetic construct
  source 1..152: mol_type = other DNA
aatgttgttgatgcacccataaattgatattgcataattatttataatcagcaacttaaccacaaaacacccataaattgatattgcacaaaacaaccataaaatgataattatgtgaatcgagtatttcagcaaaactactgcagtaagaa

SEQ ID NO: 4463 - DNA, 152 bp, synthetic construct
  source 1..152: mol_type = other DNA
aatgttgttgatgcacccataaattgatattgcataattatttataatcagcaacttaaccacaaaacacccataaattgatattgcacaaaacacccataaattgataattatgtgaatcgagtatttcagcaaaactactgcagtaagaa

SEQ ID NO: 4464 - DNA, 152 bp, synthetic construct
  source 1..152: mol_type = other DNA
aatgttgttgatgcacccataaattgatattgcataattatttataatcagcaacttaaccacaaaacacccataaattgatattgcacaaaacacccataaattgatattgctgtgaatcgagtatttcagcaaaactactgcagtaagaa

SEQ ID NO: 4465 - DNA, 152 bp, synthetic construct
  source 1..152: mol_type = other DNA
aatgttgttgatgcacccataaattgatattgcataattatttataatcagcaacttaaccacaaaacacccataaattgatattgcacaaaacaaccataagttgatatttttgtgaatcgagtatttcagcaaaactactgcagtaagaa

SEQ ID NO: 4466 - DNA, 152 bp, synthetic construct
  source 1..152: mol_type = other DNA
aatgttgttgatgcacccataaattgatattgcataattatttataatcagcaacttaaccacaaaacacccataaattgatattgcacaaaacaaccatatattgatatctctgtgaatcgagtatttcagcaaaactactgcagtaagaa

SEQ ID NO: 4467 - DNA, 152 bp, synthetic construct
  source 1..152: mol_type = other DNA
aatgttgttgatgcacccataaattgatattgcataattatttataatcagcaacttaaccacaaaacacccataaattgatattgcacaaaacaaccataaagtgatatttatgtgaatcgagtatttcagcaaaactactgcagtaagaa

SEQ ID NO: 4468 - DNA, 152 bp, synthetic construct
  source 1..152: mol_type = other DNA
aatgttgttgatgcacccataaattgatattgcataattatttataatcagcaacttaaccacaaaacaaccataagttgatattttacaaaacaaccataaaatgataattatgtgaatcgagtatttcagcaaaactactgcagtaagaa

SEQ ID NO: 4469 - DNA, 152 bp, synthetic construct
  source 1..152: mol_type = other DNA
aatgttgttgatgcacccataaattgatattgcataattatttataatcagcaacttaaccacaaaacaaccataagttgatattttacaaaacacccataaattgataattatgtgaatcgagtatttcagcaaaactactgcagtaagaa

SEQ ID NO: 4470 - DNA, 152 bp, synthetic construct
  source 1..152: mol_type = other DNA
aatgttgttgatgcacccataaattgatattgcataattatttataatcagcaacttaaccacaaaacaaccataagttgatattttacaaaacacccataaattgatattgctgtgaatcgagtatttcagcaaaactactgcagtaagaa

SEQ ID NO: 4471 - DNA, 152 bp, synthetic construct
  source 1..152: mol_type = other DNA
aatgttgttgatgcacccataaattgatattgcataattatttataatcagcaacttaaccacaaaacaaccataagttgatattttacaaaacaaccataagttgatatttttgtgaatcgagtatttcagcaaaactactgcagtaagaa

SEQ ID NO: 4472 - DNA, 152 bp, synthetic construct
  source 1..152: mol_type = other DNA
aatgttgttgatgcacccataaattgatattgcataattatttataatcagcaacttaaccacaaaacaaccataagttgatattttacaaaacaaccatatattgatatctctgtgaatcgagtatttcagcaaaactactgcagtaagaa

SEQ ID NO: 4473 - DNA, 152 bp, synthetic construct
  source 1..152: mol_type = other DNA
aatgttgttgatgcacccataaattgatattgcataattatttataatcagcaacttaaccacaaaacaaccataagttgatattttacaaaacaaccataaagtgatatttatgtgaatcgagtatttcagcaaaactactgcagtaagaa

SEQ ID NO: 4474 - DNA, 152 bp, synthetic construct
  source 1..152: mol_type = other DNA
aatgttgttgatgcacccataaattgatattgcataattatttataatcagcaacttaaccacaaaacaaccatatattgatatctcacaaaacaaccataaaatgataattatgtgaatcgagtatttcagcaaaactactgcagtaagaa

SEQ ID NO: 4475 - DNA, 152 bp, synthetic construct
  source 1..152: mol_type = other DNA
aatgttgttgatgcacccataaattgatattgcataattatttataatcagcaacttaaccacaaaacaaccatatattgatatctcacaaaacacccataaattgataattatgtgaatcgagtatttcagcaaaactactgcagtaagaa

SEQ ID NO: 4476 - DNA, 152 bp, synthetic construct
  source 1..152: mol_type = other DNA
aatgttgttgatgcacccataaattgatattgcataattatttataatcagcaacttaaccacaaaacaaccatatattgatatctcacaaaacacccataaattgatattgctgtgaatcgagtatttcagcaaaactactgcagtaagaa

SEQ ID NO: 4477 - DNA, 152 bp, synthetic construct
  source 1..152: mol_type = other DNA
aatgttgttgatgcacccataaattgatattgcataattatttataatcagcaacttaaccacaaaacaaccatatattgatatctcacaaaacaaccataagttgatatttttgtgaatcgagtatttcagcaaaactactgcagtaagaa

SEQ ID NO: 4478 - DNA, 152 bp, synthetic construct
  source 1..152: mol_type = other DNA
aatgttgttgatgcacccataaattgatattgcataattatttataatcagcaacttaaccacaaaacaaccatatattgatatctcacaaaacaaccatatattgatatctctgtgaatcgagtatttcagcaaaactactgcagtaagaa

SEQ ID NO: 4479 - DNA, 152 bp, synthetic construct
  source 1..152: mol_type = other DNA
aatgttgttgatgcacccataaattgatattgcataattatttataatcagcaacttaaccacaaaacaaccatatattgatatctcacaaaacaaccataaagtgatatttatgtgaatcgagtatttcagcaaaactactgcagtaagaa

SEQ ID NO: 4480 - DNA, 152 bp, synthetic construct
  source 1..152: mol_type = other DNA
aatgttgttgatgcacccataaattgatattgcataattatttataatcagcaacttaaccacaaaacaaccataaagtgatatttaacaaaacaaccataaaatgataattatgtgaatcgagtatttcagcaaaactactgcagtaagaa

SEQ ID NO: 4481 - DNA, 152 bp, synthetic construct
  source 1..152: mol_type = other DNA
aatgttgttgatgcacccataaattgatattgcataattatttataatcagcaacttaaccacaaaacaaccataaagtgatatttaacaaaacacccataaattgataattatgtgaatcgagtatttcagcaaaactactgcagtaagaa

SEQ ID NO: 4482 - DNA, 152 bp, synthetic construct
  source 1..152: mol_type = other DNA
aatgttgttgatgcacccataaattgatattgcataattatttataatcagcaacttaaccacaaaacaaccataaagtgatatttaacaaaacacccataaattgatattgctgtgaatcgagtatttcagcaaaactactgcagtaagaa

SEQ ID NO: 4483 - DNA, 152 bp, synthetic construct
  source 1..152: mol_type = other DNA
aatgttgttgatgcacccataaattgatattgcataattatttataatcagcaacttaaccacaaaacaaccataaagtgatatttaacaaaacaaccataagttgatatttttgtgaatcgagtatttcagcaaaactactgcagtaagaa

SEQ ID NO: 4484 - DNA, 152 bp, synthetic construct
  source 1..152: mol_type = other DNA
aatgttgttgatgcacccataaattgatattgcataattatttataatcagcaacttaaccacaaaacaaccataaagtgatatttaacaaaacaaccatatattgatatctctgtgaatcgagtatttcagcaaaactactgcagtaagaa

SEQ ID NO: 4485 - DNA, 152 bp, synthetic construct
  source 1..152: mol_type = other DNA
aatgttgttgatgcacccataaattgatattgcataattatttataatcagcaacttaaccacaaaacaaccataaagtgatatttaacaaaacaaccataaagtgatatttatgtgaatcgagtatttcagcaaaactactgcagtaagaa

SEQ ID NO: 4486 - DNA, 152 bp, synthetic construct
  source 1..152: mol_type = other DNA
aatgttgttgatgcaaccataagttgatattttataattatttataatcagcaacttaaccacaaaacaaccataaaatgataattaacaaaacaaccataaaatgataattatgtgaatcgagtatttcagcaaaactactgcagtaagaa

SEQ ID NO: 4487 - DNA, 152 bp, synthetic construct
  source 1..152: mol_type = other DNA
aatgttgttgatgcaaccataagttgatattttataattatttataatcagcaacttaaccacaaaacaaccataaaatgataattaacaaaacacccataaattgataattatgtgaatcgagtatttcagcaaaactactgcagtaagaa

SEQ ID NO: 4488 - DNA, 152 bp, synthetic construct
  source 1..152: mol_type = other DNA
aatgttgttgatgcaaccataagttgatattttataattatttataatcagcaacttaaccacaaaacaaccataaaatgataattaacaaaacacccataaattgatattgctgtgaatcgagtatttcagcaaaactactgcagtaagaa

SEQ ID NO: 4489 - DNA, 152 bp, synthetic construct
  source 1..152: mol_type = other DNA
aatgttgttgatgcaaccataagttgatattttataattatttataatcagcaacttaaccacaaaacaaccataaaatgataattaacaaaacaaccataagttgatatttttgtgaatcgagtatttcagcaaaactactgcagtaagaa

SEQ ID NO: 4490 - DNA, 152 bp, synthetic construct
  source 1..152: mol_type = other DNA
aatgttgttgatgcaaccataagttgatattttataattatttataatcagcaacttaaccacaaaacaaccataaaatgataattaacaaaacaaccatatattgatatctctgtgaatcgagtatttcagcaaaactactgcagtaagaa

SEQ ID NO: 4491 - DNA, 152 bp, synthetic construct
  source 1..152: mol_type = other DNA
aatgttgttgatgcaaccataagttgatattttataattatttataatcagcaacttaaccacaaaacaaccataaaatgataattaacaaaacaaccataaagtgatatttatgtgaatcgagtatttcagcaaaactactgcagtaagaa

SEQ ID NO: 4492 - DNA, 152 bp, synthetic construct
  source 1..152: mol_type = other DNA
aatgttgttgatgcaaccataagttgatattttataattatttataatcagcaacttaaccacaaaacacccataaattgataattaacaaaacaaccataaaatgataattatgtgaatcgagtatttcagcaaaactactgcagtaagaa

SEQ ID NO: 4493 - DNA, 152 bp, synthetic construct
  source 1..152: mol_type = other DNA
aatgttgttgatgcaaccataagttgatattttataattatttataatcagcaacttaaccacaaaacacccataaattgataattaacaaaacacccataaattgataattatgtgaatcgagtatttcagcaaaactactgcagtaagaa

SEQ ID NO: 4494 - DNA, 152 bp, synthetic construct
  source 1..152: mol_type = other DNA
aatgttgttgatgcaaccataagttgatattttataattatttataatcagcaacttaaccacaaaacacccataaattgataattaacaaaacacccataaattgatattgctgtgaatcgagtatttcagcaaaactactgcagtaagaa

SEQ ID NO: 4495 - DNA, 152 bp, synthetic construct
  source 1..152: mol_type = other DNA
aatgttgttgatgcaaccataagttgatattttataattatttataatcagcaacttaaccacaaaacacccataaattgataattaacaaaacaaccataagttgatatttttgtgaatcgagtatttcagcaaaactactgcagtaagaa

SEQ ID NO: 4496 - DNA, 152 bp, synthetic construct
  source 1..152: mol_type = other DNA
aatgttgttgatgcaaccataagttgatattttataattatttataatcagcaacttaaccacaaaacacccataaattgataattaacaaaacaaccatatattgatatctctgtgaatcgagtatttcagcaaaactactgcagtaagaa

SEQ ID NO: 4497 - DNA, 152 bp, synthetic construct
  source 1..152: mol_type = other DNA
aatgttgttgatgcaaccataagttgatattttataattatttataatcagcaacttaaccacaaaacacccataaattgataattaacaaaacaaccataaagtgatatttatgtgaatcgagtatttcagcaaaactactgcagtaagaa

SEQ ID NO: 4498 - DNA, 152 bp, synthetic construct
  source 1..152: mol_type = other DNA
aatgttgttgatgcaaccataagttgatattttataattatttataatcagcaacttaaccacaaaacacccataaattgatattgcacaaaacaaccataaaatgataattatgtgaatcgagtatttcagcaaaactactgcagtaagaa

SEQ ID NO: 4499 - DNA, 152 bp, synthetic construct
  source 1..152: mol_type = other DNA
aatgttgttgatgcaaccataagttgatattttataattatttataatcagcaacttaaccacaaaacacccataaattgatattgcacaaaacacccataaattgataattatgtgaatcgagtatttcagcaaaactactgcagtaagaa

SEQ ID NO: 4500 - DNA, 152 bp, synthetic construct
  source 1..152: mol_type = other DNA
aatgttgttgatgcaaccataagttgatattttataattatttataatcagcaacttaaccacaaaacacccataaattgatattgcacaaaacacccataaattgatattgctgtgaatcgagtatttcagcaaaactactgcagtaagaa

SEQ ID NO: 4501 - DNA, 152 bp, synthetic construct
  source 1..152: mol_type = other DNA
aatgttgttgatgcaaccataagttgatattttataattatttataatcagcaacttaaccacaaaacacccataaattgatattgcacaaaacaaccataagttgatatttttgtgaatcgagtatttcagcaaaactactgcagtaagaa

SEQ ID NO: 4502 - DNA, 152 bp, synthetic construct
  source 1..152: mol_type = other DNA
aatgttgttgatgcaaccataagttgatattttataattatttataatcagcaacttaaccacaaaacacccataaattgatattgcacaaaacaaccatatattgatatctctgtgaatcgagtatttcagcaaaactactgcagtaagaa

SEQ ID NO: 4503 - DNA, 152 bp, synthetic construct
  source 1..152: mol_type = other DNA
aatgttgttgatgcaaccataagttgatattttataattatttataatcagcaacttaaccacaaaacacccataaattgatattgcacaaaacaaccataaagtgatatttatgtgaatcgagtatttcagcaaaactactgcagtaagaa

SEQ ID NO: 4504 - DNA, 152 bp, synthetic construct
  source 1..152: mol_type = other DNA
aatgttgttgatgcaaccataagttgatattttataattatttataatcagcaacttaaccacaaaacaaccataagttgatattttacaaaacaaccataaaatgataattatgtgaatcgagtatttcagcaaaactactgcagtaagaa

SEQ ID NO: 4505 - DNA, 152 bp, synthetic construct
  source 1..152: mol_type = other DNA
aatgttgttgatgcaaccataagttgatattttataattatttataatcagcaacttaaccacaaaacaaccataagttgatattttacaaaacacccataaattgataattatgtgaatcgagtatttcagcaaaactactgcagtaagaa

SEQ ID NO: 4506 - DNA, 152 bp, synthetic construct
  source 1..152: mol_type = other DNA
aatgttgttgatgcaaccataagttgatattttataattatttataatcagcaacttaaccacaaaacaaccataagttgatattttacaaaacacccataaattgatattgctgtgaatcgagtatttcagcaaaactactgcagtaagaa

SEQ ID NO: 4507 - DNA, 152 bp, synthetic construct
  source 1..152: mol_type = other DNA
aatgttgttgatgcaaccataagttgatattttataattatttataatcagcaacttaaccacaaaacaaccataagttgatattttacaaaacaaccataagttgatatttttgtgaatcgagtatttcagcaaaactactgcagtaagaa

SEQ ID NO: 4508 - DNA, 152 bp, synthetic construct
  source 1..152: mol_type = other DNA
aatgttgttgatgcaaccataagttgatattttataattatttataatcagcaacttaaccacaaaacaaccataagttgatattttacaaaacaaccatatattgatatctctgtgaatcgagtatttcagcaaaactactgcagtaagaa

SEQ ID NO: 4509 - DNA, 152 bp, synthetic construct
  source 1..152: mol_type = other DNA
aatgttgttgatgcaaccataagttgatattttataattatttataatcagcaacttaaccacaaaacaaccataagttgatattttacaaaacaaccataaagtgatatttatgtgaatcgagtatttcagcaaaactactgcagtaagaa

SEQ ID NO: 4510 - DNA, 152 bp, synthetic construct
  source 1..152: mol_type = other DNA
aatgttgttgatgcaaccataagttgatattttataattatttataatcagcaacttaaccacaaaacaaccatatattgatatctcacaaaacaaccataaaatgataattatgtgaatcgagtatttcagcaaaactactgcagtaagaa

SEQ ID NO: 4511 - DNA, 152 bp, synthetic construct
  source 1..152: mol_type = other DNA
aatgttgttgatgcaaccataagttgatattttataattatttataatcagcaacttaaccacaaaacaaccatatattgatatctcacaaaacacccataaattgataattatgtgaatcgagtatttcagcaaaactactgcagtaagaa

SEQ ID NO: 4512 - DNA, 152 bp, synthetic construct
  source 1..152: mol_type = other DNA
aatgttgttgatgcaaccataagttgatattttataattatttataatcagcaacttaaccacaaaacaaccatatattgatatctcacaaaacacccataaattgatattgctgtgaatcgagtatttcagcaaaactactgcagtaagaa

SEQ ID NO: 4513 - DNA, 152 bp, synthetic construct
  source 1..152: mol_type = other DNA
aatgttgttgatgcaaccataagttgatattttataattatttataatcagcaacttaaccacaaaacaaccatatattgatatctcacaaaacaaccataagttgatatttttgtgaatcgagtatttcagcaaaactactgcagtaagaa

SEQ ID NO: 4514 - DNA, 152 bp, synthetic construct
  source 1..152: mol_type = other DNA
aatgttgttgatgcaaccataagttgatattttataattatttataatcagcaacttaaccacaaaacaaccatatattgatatctcacaaaacaaccatatattgatatctctgtgaatcgagtatttcagcaaaactactgcagtaagaa

SEQ ID NO: 4515 - DNA, 152 bp, synthetic construct
  source 1..152: mol_type = other DNA
aatgttgttgatgcaaccataagttgatattttataattatttataatcagcaacttaaccacaaaacaaccatatattgatatctcacaaaacaaccataaagtgatatttatgtgaatcgagtatttcagcaaaactactgcagtaagaa

SEQ ID NO: 4516 - DNA, 152 bp, synthetic construct
  source 1..152: mol_type = other DNA
aatgttgttgatgcaaccataagttgatattttataattatttataatcagcaacttaaccacaaaacaaccataaagtgatatttaacaaaacaaccataaaatgataattatgtgaatcgagtatttcagcaaaactactgcagtaagaa

SEQ ID NO: 4517 - DNA, 152 bp, synthetic construct
  source 1..152: mol_type = other DNA
aatgttgttgatgcaaccataagttgatattttataattatttataatcagcaacttaaccacaaaacaaccataaagtgatatttaacaaaacacccataaattgataattatgtgaatcgagtatttcagcaaaactactgcagtaagaa

SEQ ID NO: 4518 - DNA, 152 bp, synthetic construct
  source 1..152: mol_type = other DNA
aatgttgttgatgcaaccataagttgatattttataattatttataatcagcaacttaaccacaaaacaaccataaagtgatatttaacaaaacacccataaattgatattgctgtgaatcgagtatttcagcaaaactactgcagtaagaa

SEQ ID NO: 4519 - DNA, 152 bp, synthetic construct
  source 1..152: mol_type = other DNA
aatgttgttgatgcaaccataagttgatattttataattatttataatcagcaacttaaccacaaaacaaccataaagtgatatttaacaaaacaaccataagttgatatttttgtgaatcgagtatttcagcaaaactactgcagtaagaa

SEQ ID NO: 4520 - DNA, 152 bp, synthetic construct
  source 1..152: mol_type = other DNA
aatgttgttgatgcaaccataagttgatattttataattatttataatcagcaacttaaccacaaaacaaccataaagtgatatttaacaaaacaaccatatattgatatctctgtgaatcgagtatttcagcaaaactactgcagtaagaa

SEQ ID NO: 4521 - DNA, 152 bp, synthetic construct
  source 1..152: mol_type = other DNA
aatgttgttgatgcaaccataagttgatattttataattatttataatcagcaacttaaccacaaaacaaccataaagtgatatttaacaaaacaaccataaagtgatatttatgtgaatcgagtatttcagcaaaactactgcagtaagaa

SEQ ID NO: 4522 - DNA, 152 bp, synthetic construct
  source 1..152: mol_type = other DNA
aatgttgttgatgcaaccatatattgatatctcataattatttataatcagcaacttaaccacaaaacaaccataaaatgataattaacaaaacaaccataaaatgataattatgtgaatcgagtatttcagcaaaactactgcagtaagaa

SEQ ID NO: 4523 - DNA, 152 bp, synthetic construct
  source 1..152: mol_type = other DNA
aatgttgttgatgcaaccatatattgatatctcataattatttataatcagcaacttaaccacaaaacaaccataaaatgataattaacaaaacacccataaattgataattatgtgaatcgagtatttcagcaaaactactgcagtaagaa

SEQ ID NO: 4524 - DNA, 152 bp, synthetic construct
  source 1..152: mol_type = other DNA
aatgttgttgatgcaaccatatattgatatctcataattatttataatcagcaacttaaccacaaaacaaccataaaatgataattaacaaaacacccataaattgatattgctgtgaatcgagtatttcagcaaaactactgcagtaagaa

SEQ ID NO: 4525 - DNA, 152 bp, synthetic construct
  source 1..152: mol_type = other DNA
aatgttgttgatgcaaccatatattgatatctcataattatttataatcagcaacttaaccacaaaacaaccataaaatgataattaacaaaacaaccataagttgatatttttgtgaatcgagtatttcagcaaaactactgcagtaagaa

SEQ ID NO: 4526 - DNA, 152 bp, synthetic construct
  source 1..152: mol_type = other DNA
aatgttgttgatgcaaccatatattgatatctcataattatttataatcagcaacttaaccacaaaacaaccataaaatgataattaacaaaacaaccatatattgatatctctgtgaatcgagtatttcagcaaaactactgcagtaagaa

SEQ ID NO: 4527 - DNA, 152 bp, synthetic construct
  source 1..152: mol_type = other DNA
aatgttgttgatgcaaccatatattgatatctcataattatttataatcagcaacttaaccacaaaacaaccataaaatgataattaacaaaacaaccataaagtgatatttatgtgaatcgagtatttcagcaaaactactgcagtaagaa

SEQ ID NO: 4528 - DNA, 152 bp, synthetic construct
  source 1..152: mol_type = other DNA
aatgttgttgatgcaaccatatattgatatctcataattatttataatcagcaacttaaccacaaaacacccataaattgataattaacaaaacaaccataaaatgataattatgtgaatcgagtatttcagcaaaactactgcagtaagaa

SEQ ID NO: 4529 - DNA, 152 bp, synthetic construct
  source 1..152: mol_type = other DNA
aatgttgttgatgcaaccatatattgatatctcataattatttataatcagcaacttaaccacaaaacacccataaattgataattaacaaaacacccataaattgataattatgtgaatcgagtatttcagcaaaactactgcagtaagaa

SEQ ID NO: 4530 - DNA, 152 bp, synthetic construct
  source 1..152: mol_type = other DNA
aatgttgttgatgcaaccatatattgatatctcataattatttataatcagcaacttaaccacaaaacacccataaattgataattaacaaaacacccataaattgatattgctgtgaatcgagtatttcagcaaaactactgcagtaagaa

SEQ ID NO: 4531 - DNA, 152 bp, synthetic construct
  source 1..152: mol_type = other DNA
aatgttgttgatgcaaccatatattgatatctcataattatttataatcagcaacttaaccacaaaacacccataaattgataattaacaaaacaaccataagttgatatttttgtgaatcgagtatttcagcaaaactactgcagtaagaa

SEQ ID NO: 4532 - DNA, 152 bp, synthetic construct
  source 1..152: mol_type = other DNA
aatgttgttgatgcaaccatatattgatatctcataattatttataatcagcaacttaaccacaaaacacccataaattgataattaacaaaacaaccatatattgatatctctgtgaatcgagtatttcagcaaaactactgcagtaagaa

SEQ ID NO: 4533 - DNA, 152 bp, synthetic construct
  source 1..152: mol_type = other DNA
aatgttgttgatgcaaccatatattgatatctcataattatttataatcagcaacttaaccacaaaacacccataaattgataattaacaaaacaaccataaagtgatatttatgtgaatcgagtatttcagcaaaactactgcagtaagaa

SEQ ID NO: 4534 - DNA, 152 bp, synthetic construct
  source 1..152: mol_type = other DNA
aatgttgttgatgcaaccatatattgatatctcataattatttataatcagcaacttaaccacaaaacacccataaattgatattgcacaaaacaaccataaaatgataattatgtgaatcgagtatttcagcaaaactactgcagtaagaa

SEQ ID NO: 4535 - DNA, 152 bp, synthetic construct
  source 1..152: mol_type = other DNA
aatgttgttgatgcaaccatatattgatatctcataattatttataatcagcaacttaaccacaaaacacccataaattgatattgcacaaaacacccataaattgataattatgtgaatcgagtatttcagcaaaactactgcagtaagaa

SEQ ID NO: 4536 - DNA, 152 bp, synthetic construct
  source 1..152: mol_type = other DNA
aatgttgttgatgcaaccatatattgatatctcataattatttataatcagcaacttaaccacaaaacacccataaattgatattgcacaaaacacccataaattgatattgctgtgaatcgagtatttcagcaaaactactgcagtaagaa

SEQ ID NO: 4537 - DNA, 152 bp, synthetic construct
  source 1..152: mol_type = other DNA
aatgttgttgatgcaaccatatattgatatctcataattatttataatcagcaacttaaccacaaaacacccataaattgatattgcacaaaacaaccataagttgatatttttgtgaatcgagtatttcagcaaaactactgcagtaagaa

SEQ ID NO: 4538 - DNA, 152 bp, synthetic construct
  source 1..152: mol_type = other DNA
aatgttgttgatgcaaccatatattgatatctcataattatttataatcagcaacttaaccacaaaacacccataaattgatattgcacaaaacaaccatatattgatatctctgtgaatcgagtatttcagcaaaactactgcagtaagaa

SEQ ID NO: 4539 - DNA, 152 bp, synthetic construct
  source 1..152: mol_type = other DNA
aatgttgttgatgcaaccatatattgatatctcataattatttataatcagcaacttaaccacaaaacacccataaattgatattgcacaaaacaaccataaagtgatatttatgtgaatcgagtatttcagcaaaactactgcagtaagaa

SEQ ID NO: 4540 - DNA, 152 bp, synthetic construct
  source 1..152: mol_type = other DNA
aatgttgttgatgcaaccatatattgatatctcataattatttataatcagcaacttaaccacaaaacaaccataagttgatattttacaaaacaaccataaaatgataattatgtgaatcgagtatttcagcaaaactactgcagtaagaa

SEQ ID NO: 4541 - DNA, 152 bp, synthetic construct
  source 1..152: mol_type = other DNA
aatgttgttgatgcaaccatatattgatatctcataattatttataatcagcaacttaaccacaaaacaaccataagttgatattttacaaaacacccataaattgataattatgtgaatcgagtatttcagcaaaactactgcagtaagaa

SEQ ID NO: 4542 - DNA, 152 bp, synthetic construct
  source 1..152: mol_type = other DNA
aatgttgttgatgcaaccatatattgatatctcataattatttataatcagcaacttaaccacaaaacaaccataagttgatattttacaaaacacccataaattgatattgctgtgaatcgagtatttcagcaaaactactgcagtaagaa

SEQ ID NO: 4543 - DNA, 152 bp, synthetic construct
  source 1..152: mol_type = other DNA
aatgttgttgatgcaaccatatattgatatctcataattatttataatcagcaacttaaccacaaaacaaccataagttgatattttacaaaacaaccataagttgatatttttgtgaatcgagtatttcagcaaaactactgcagtaagaa

SEQ ID NO: 4544 - DNA, 152 bp, synthetic construct
  source 1..152: mol_type = other DNA
aatgttgttgatgcaaccatatattgatatctcataattatttataatcagcaacttaaccacaaaacaaccataagttgatattttacaaaacaaccatatattgatatctctgtgaatcgagtatttcagcaaaactactgcagtaagaa

SEQ ID NO: 4545 - DNA, 152 bp, synthetic construct
  source 1..152: mol_type = other DNA
aatgttgttgatgcaaccatatattgatatctcataattatttataatcagcaacttaaccacaaaacaaccataagttgatattttacaaaacaaccataaagtgatatttatgtgaatcgagtatttcagcaaaactactgcagtaagaa

SEQ ID NO: 4546 - DNA, 152 bp, synthetic construct
  source 1..152: mol_type = other DNA
aatgttgttgatgcaaccatatattgatatctcataattatttataatcagcaacttaaccacaaaacaaccatatattgatatctcacaaaacaaccataaaatgataattatgtgaatcgagtatttcagcaaaactactgcagtaagaa

SEQ ID NO: 4547 - DNA, 152 bp, synthetic construct
  source 1..152: mol_type = other DNA
aatgttgttgatgcaaccatatattgatatctcataattatttataatcagcaacttaaccacaaaacaaccatatattgatatctcacaaaacacccataaattgataattatgtgaatcgagtatttcagcaaaactactgcagtaagaa

SEQ ID NO: 4548 - DNA, 152 bp, synthetic construct
  source 1..152: mol_type = other DNA
aatgttgttgatgcaaccatatattgatatctcataattatttataatcagcaacttaaccacaaaacaaccatatattgatatctcacaaaacacccataaattgatattgctgtgaatcgagtatttcagcaaaactactgcagtaagaa

SEQ ID NO: 4549 - DNA, 152 bp, synthetic construct
  source 1..152: mol_type = other DNA
aatgttgttgatgcaaccatatattgatatctcataattatttataatcagcaacttaaccacaaaacaaccatatattgatatctcacaaaacaaccataagttgatatttttgtgaatcgagtatttcagcaaaactactgcagtaagaa

SEQ ID NO: 4550 - DNA, 152 bp, synthetic construct
  source 1..152: mol_type = other DNA
aatgttgttgatgcaaccatatattgatatctcataattatttataatcagcaacttaaccacaaaacaaccatatattgatatctcacaaaacaaccatatattgatatctctgtgaatcgagtatttcagcaaaactactgcagtaagaa

SEQ ID NO: 4551 - DNA, 152 bp, synthetic construct
  source 1..152: mol_type = other DNA
aatgttgttgatgcaaccatatattgatatctcataattatttataatcagcaacttaaccacaaaacaaccatatattgatatctcacaaaacaaccataaagtgatatttatgtgaatcgagtatttcagcaaaactactgcagtaagaa

SEQ ID NO: 4552 - DNA, 152 bp, synthetic construct
  source 1..152: mol_type = other DNA
aatgttgttgatgcaaccatatattgatatctcataattatttataatcagcaacttaaccacaaaacaaccataaagtgatatttaacaaaacaaccataaaatgataattatgtgaatcgagtatttcagcaaaactactgcagtaagaa

SEQ ID NO: 4553 - DNA, 152 bp, synthetic construct
  source 1..152: mol_type = other DNA
aatgttgttgatgcaaccatatattgatatctcataattatttataatcagcaacttaaccacaaaacaaccataaagtgatatttaacaaaacacccataaattgataattatgtgaatcgagtatttcagcaaaactactgcagtaagaa

SEQ ID NO: 4554 - DNA, 152 bp, synthetic construct
  source 1..152: mol_type = other DNA
aatgttgttgatgcaaccatatattgatatctcataattatttataatcagcaacttaaccacaaaacaaccataaagtgatatttaacaaaacacccataaattgatattgctgtgaatcgagtatttcagcaaaactactgcagtaagaa

SEQ ID NO: 4555 - DNA, 152 bp, synthetic construct
  source 1..152: mol_type = other DNA
aatgttgttgatgcaaccatatattgatatctcataattatttataatcagcaacttaaccacaaaacaaccataaagtgatatttaacaaaacaaccataagttgatatttttgtgaatcgagtatttcagcaaaactactgcagtaagaa

SEQ ID NO: 4556 - DNA, 152 bp, synthetic construct
  source 1..152: mol_type = other DNA
aatgttgttgatgcaaccatatattgatatctcataattatttataatcagcaacttaaccacaaaacaaccataaagtgatatttaacaaaacaaccatatattgatatctctgtgaatcgagtatttcagcaaaactactgcagtaagaa

SEQ ID NO: 4557 - DNA, 152 bp, synthetic construct
  source 1..152: mol_type = other DNA
aatgttgttgatgcaaccatatattgatatctcataattatttataatcagcaacttaaccacaaaacaaccataaagtgatatttaacaaaacaaccataaagtgatatttatgtgaatcgagtatttcagcaaaactactgcagtaagaa

SEQ ID NO: 4558 - DNA, 152 bp, synthetic construct
  source 1..152: mol_type = other DNA
aatgttgttgatgcaaccataaagtgatatttaataattatttataatcagcaacttaaccacaaaacaaccataaaatgataattaacaaaacaaccataaaatgataattatgtgaatcgagtatttcagcaaaactactgcagtaagaa

SEQ ID NO: 4559 - DNA, 152 bp, synthetic construct
  source 1..152: mol_type = other DNA
aatgttgttgatgcaaccataaagtgatatttaataattatttataatcagcaacttaaccacaaaacaaccataaaatgataattaacaaaacacccataaattgataattatgtgaatcgagtatttcagcaaaactactgcagtaagaa

SEQ ID NO: 4560 - DNA, 152 bp, synthetic construct
  source 1..152: mol_type = other DNA
aatgttgttgatgcaaccataaagtgatatttaataattatttataatcagcaacttaaccacaaaacaaccataaaatgataattaacaaaacacccataaattgatattgctgtgaatcgagtatttcagcaaaactactgcagtaagaa

SEQ ID NO: 4561 - DNA, 152 bp, synthetic construct
  source 1..152: mol_type = other DNA
aatgttgttgatgcaaccataaagtgatatttaataattatttataatcagcaacttaaccacaaaacaaccataaaatgataattaacaaaacaaccataagttgatatttttgtgaatcgagtatttcagcaaaactactgcagtaagaa

SEQ ID NO: 4562 - DNA, 152 bp, synthetic construct
  source 1..152: mol_type = other DNA
aatgttgttgatgcaaccataaagtgatatttaataattatttataatcagcaacttaaccacaaaacaaccataaaatgataattaacaaaacaaccatatattgatatctctgtgaatcgagtatttcagcaaaactactgcagtaagaa

SEQ ID NO: 4563 - DNA, 152 bp, synthetic construct
  source 1..152: mol_type = other DNA
aatgttgttgatgcaaccataaagtgatatttaataattatttataatcagcaacttaaccacaaaacaaccataaaatgataattaacaaaacaaccataaagtgatatttatgtgaatcgagtatttcagcaaaactactgcagtaagaa

SEQ ID NO: 4564 - DNA, 152 bp, synthetic construct
  source 1..152: mol_type = other DNA
aatgttgttgatgcaaccataaagtgatatttaataattatttataatcagcaacttaaccacaaaacacccataaattgataattaacaaaacaaccataaaatgataattatgtgaatcgagtatttcagcaaaactactgcagtaagaa

SEQ ID NO: 4565 - DNA, 152 bp, synthetic construct
  source 1..152: mol_type = other DNA
aatgttgttgatgcaaccataaagtgatatttaataattatttataatcagcaacttaaccacaaaacacccataaattgataattaacaaaacacccataaattgataattatgtgaatcgagtatttcagcaaaactactgcagtaagaa

SEQ ID NO: 4566 - DNA, 152 bp, synthetic construct
  source 1..152: mol_type = other DNA
aatgttgttgatgcaaccataaagtgatatttaataattatttataatcagcaacttaaccacaaaacacccataaattgataattaacaaaacacccataaattgatattgctgtgaatcgagtatttcagcaaaactactgcagtaagaa

SEQ ID NO: 4567 - DNA, 152 bp, synthetic construct
  source 1..152: mol_type = other DNA
aatgttgttgatgcaaccataaagtgatatttaataattatttataatcagcaacttaaccacaaaacacccataaattgataattaacaaaacaaccataagttgatatttttgtgaatcgagtatttcagcaaaactactgcagtaagaa

SEQ ID NO: 4568 - DNA, 152 bp, synthetic construct
  source 1..152: mol_type = other DNA
aatgttgttgatgcaaccataaagtgatatttaataattatttataatcagcaacttaaccacaaaacacccataaattgataattaacaaaacaaccatatattgatatctctgtgaatcgagtatttcagcaaaactactgcagtaagaa

SEQ ID NO: 4569 - DNA, 152 bp, synthetic construct
  source 1..152: mol_type = other DNA
aatgttgttgatgcaaccataaagtgatatttaataattatttataatcagcaacttaaccacaaaacacccataaattgataattaacaaaacaaccataaagtgatatttatgtgaatcgagtatttcagcaaaactactgcagtaagaa

SEQ ID NO: 4570 - DNA, 152 bp, synthetic construct
  source 1..152: mol_type = other DNA
aatgttgttgatgcaaccataaagtgatatttaataattatttataatcagcaacttaaccacaaaacacccataaattgatattgcacaaaacaaccataaaatgataattatgtgaatcgagtatttcagcaaaactactgcagtaagaa

SEQ ID NO: 4571 - DNA, 152 bp, synthetic construct
  source 1..152: mol_type = other DNA
aatgttgttgatgcaaccataaagtgatatttaataattatttataatcagcaacttaaccacaaaacacccataaattgatattgcacaaaacacccataaattgataattatgtgaatcgagtatttcagcaaaactactgcagtaagaa

SEQ ID NO: 4572 - DNA, 152 bp, synthetic construct
  source 1..152: mol_type = other DNA
aatgttgttgatgcaaccataaagtgatatttaataattatttataatcagcaacttaaccacaaaacacccataaattgatattgcacaaaacacccataaattgatattgctgtgaatcgagtatttcagcaaaactactgcagtaagaa

SEQ ID NO: 4573 - DNA, 152 bp, synthetic construct
  source 1..152: mol_type = other DNA
aatgttgttgatgcaaccataaagtgatatttaataattatttataatcagcaacttaaccacaaaacacccataaattgatattgcacaaaacaaccataagttgatatttttgtgaatcgagtatttcagcaaaactactgcagtaagaa

SEQ ID NO: 4574 - DNA, 152 bp, synthetic construct
  source 1..152: mol_type = other DNA
aatgttgttgatgcaaccataaagtgatatttaataattatttataatcagcaacttaaccacaaaacacccataaattgatattgcacaaaacaaccatatattgatatctctgtgaatcgagtatttcagcaaaactactgcagtaagaa

SEQ ID NO: 4575 - DNA, 152 bp, synthetic construct
  source 1..152: mol_type = other DNA
aatgttgttgatgcaaccataaagtgatatttaataattatttataatcagcaacttaaccacaaaacacccataaattgatattgcacaaaacaaccataaagtgatatttatgtgaatcgagtatttcagcaaaactactgcagtaagaa

SEQ ID NO: 4576 - DNA, 152 bp, synthetic construct
  source 1..152: mol_type = other DNA
aatgttgttgatgcaaccataaagtgatatttaataattatttataatcagcaacttaaccacaaaacaaccataagttgatattttacaaaacaaccataaaatgataattatgtgaatcgagtatttcagcaaaactactgcagtaagaa

SEQ ID NO: 4577 - DNA, 152 bp, synthetic construct
  source 1..152: mol_type = other DNA
aatgttgttgatgcaaccataaagtgatatttaataattatttataatcagcaacttaaccacaaaacaaccataagttgatattttacaaaacacccataaattgataattatgtgaatcgagtatttcagcaaaactactgcagtaagaa

SEQ ID NO: 4578 - DNA, 152 bp, synthetic construct
  source 1..152: mol_type = other DNA
aatgttgttgatgcaaccataaagtgatatttaataattatttataatcagcaacttaaccacaaaacaaccataagttgatattttacaaaacacccataaattgatattgctgtgaatcgagtatttcagcaaaactactgcagtaagaa

SEQ ID NO: 4579 - DNA, 152 bp, synthetic construct
  source 1..152: mol_type = other DNA
aatgttgttgatgcaaccataaagtgatatttaataattatttataatcagcaacttaaccacaaaacaaccataagttgatattttacaaaacaaccataagttgatatttttgtgaatcgagtatttcagcaaaactactgcagtaagaa

SEQ ID NO: 4580 - DNA, 152 bp, synthetic construct
  source 1..152: mol_type = other DNA
aatgttgttgatgcaaccataaagtgatatttaataattatttataatcagcaacttaaccacaaaacaaccataagttgatattttacaaaacaaccatatattgatatctctgtgaatcgagtatttcagcaaaactactgcagtaagaa

SEQ ID NO: 4581 - DNA, 152 bp, synthetic construct
  source 1..152: mol_type = other DNA
aatgttgttgatgcaaccataaagtgatatttaataattatttataatcagcaacttaaccacaaaacaaccataagttgatattttacaaaacaaccataaagtgatatttatgtgaatcgagtatttcagcaaaactactgcagtaagaa

SEQ ID NO: 4582 - DNA, 152 bp, synthetic construct
  source 1..152: mol_type = other DNA
aatgttgttgatgcaaccataaagtgatatttaataattatttataatcagcaacttaaccacaaaacaaccatatattgatatctcacaaaacaaccataaaatgataattatgtgaatcgagtatttcagcaaaactactgcagtaagaa

SEQ ID NO: 4583 - DNA, 152 bp, synthetic construct
  source 1..152: mol_type = other DNA
aatgttgttgatgcaaccataaagtgatatttaataattatttataatcagcaacttaaccacaaaacaaccatatattgatatctcacaaaacacccataaattgataattatgtgaatcgagtatttcagcaaaactactgcagtaagaa

SEQ ID NO: 4584 - DNA, 152 bp, synthetic construct
  source 1..152: mol_type = other DNA
aatgttgttgatgcaaccataaagtgatatttaataattatttataatcagcaacttaaccacaaaacaaccatatattgatatctcacaaaacacccataaattgatattgctgtgaatcgagtatttcagcaaaactactgcagtaagaa

SEQ ID NO: 4585 - DNA, 152 bp, synthetic construct
  source 1..152: mol_type = other DNA
aatgttgttgatgcaaccataaagtgatatttaataattatttataatcagcaacttaaccacaaaacaaccatatattgatatctcacaaaacaaccatatattgatatctctgtgaatcgagtatttcagcaaaactactgcagtaagaa

SEQ ID NO: 4586 - DNA, 152 bp, synthetic construct
  source 1..152: mol_type = other DNA
aatgttgttgatgcaaccataaagtgatatttaataattatttataatcagcaacttaaccacaaaacaaccatatattgatatctcacaaaacaaccataaagtgatatttatgtgaatcgagtatttcagcaaaactactgcagtaagaa

SEQ ID NO: 4587 - DNA, 152 bp, synthetic construct
  source 1..152: mol_type = other DNA
aatgttgttgatgcaaccataaagtgatatttaataattatttataatcagcaacttaaccacaaaacaaccataaagtgatatttaacaaaacaaccataaaatgataattatgtgaatcgagtatttcagcaaaactactgcagtaagaa

SEQ ID NO: 4588 - DNA, 152 bp, synthetic construct
  source 1..152: mol_type = other DNA
aatgttgttgatgcaaccataaagtgatatttaataattatttataatcagcaacttaaccacaaaacaaccataaagtgatatttaacaaaacacccataaattgataattatgtgaatcgagtatttcagcaaaactactgcagtaagaa

SEQ ID NO: 4589 - DNA, 152 bp, synthetic construct
  source 1..152: mol_type = other DNA
aatgttgttgatgcaaccataaagtgatatttaataattatttataatcagcaacttaaccacaaaacaaccataaagtgatatttaacaaaacacccataaattgatattgctgtgaatcgagtatttcagcaaaactactgcagtaagaa

SEQ ID NO: 4590 - DNA, 152 bp, synthetic construct
  source 1..152: mol_type = other DNA
aatgttgttgatgcaaccataaagtgatatttaataattatttataatcagcaacttaaccacaaaacaaccataaagtgatatttaacaaaacaaccataagttgatatttttgtgaatcgagtatttcagcaaaactactgcagtaagaa

SEQ ID NO: 4591 - DNA, 152 bp, synthetic construct
  source 1..152: mol_type = other DNA
aatgttgttgatgcaaccataaagtgatatttaataattatttataatcagcaacttaaccacaaaacaaccataaagtgatatttaacaaaacaaccatatattgatatctctgtgaatcgagtatttcagcaaaactactgcagtaagaa

SEQ ID NO: 4592 - DNA, 152 bp, synthetic construct
  source 1..152: mol_type = other DNA
aatgttgttgatgcaaccataaagtgatatttaataattatttataatcagcaacttaaccacaaaacaaccataaagtgatatttaacaaaacaaccataaagtgatatttatgtgaatcgagtatttcagcaaaactactgcagtaagaa

SEQ ID NO: 4593 - DNA, 152 bp, synthetic construct
  source 1..152: mol_type = other DNA
aatgttgttgatgaccaacgcctggtcgcggggataattatttataatcagcaacttaaccacaaaacaaccatatattgatatctcacaaaacaaccataagttgatatttttgtgaatcgagtatttcagcaaaactactgcagtaagaa

SEQ ID NO: 4594 - DNA, 152 bp, synthetic construct
  source 1..152: mol_type = other DNA
aatgttgttgatgcaaccataaagtgatatttaataattatttataatcagcaacttaaccacaaaaaccaacgcgcggtcgcgagaacaaaacaaccataagttgatatttttgtgaatcgagtatttcagcaaaactactgcagtaagaa

SEQ ID NO: 4595 - DNA, 152 bp, synthetic construct
  source 1..152: mol_type = other DNA
aatgttgttgatgcaaccataaagtgatatttaataattatttataatcagcaacttaaccacaaaacaaccatatattgatatctcacaaaaaccaacgccctgtcgcgggctgtgaatcgagtatttcagcaaaactactgcagtaagaa

SEQ ID NO: 4596 - DNA, 152 bp, synthetic construct
  source 1..152: mol_type = other DNA
aatgttgttgatgaccaacgcctggtcgcggggataattatttataatcagcaacttaaccacaaaaaccaacgcgcggtcgcgagaacaaaacaaccataagttgatatttttgtgaatcgagtatttcagcaaaactactgcagtaagaa

SEQ ID NO: 4597 - DNA, 152 bp, synthetic construct
  source 1..152: mol_type = other DNA
aatgttgttgatgaccaacgcctggtcgcggggataattatttataatcagcaacttaaccacaaaacaaccatatattgatatctcacaaaaaccaacgccctgtcgcgggctgtgaatcgagtatttcagcaaaactactgcagtaagaa

SEQ ID NO: 4598 - DNA, 152 bp, synthetic construct
  source 1..152: mol_type = other DNA
aatgttgttgatgcaaccataaagtgatatttaataattatttataatcagcaacttaaccacaaaaaccaacgcgcggtcgcgagaacaaaaaccaacgccctgtcgcgggctgtgaatcgagtatttcagcaaaactactgcagtaagaa

SEQ ID NO: 4599 - DNA, 152 bp, synthetic construct
  source 1..152: mol_type = other DNA
aatgttgttgatgaccaacgcctggtcgcggggataattatttataatcagcaacttaaccacaaaaaccaacgcgcggtcgcgagaacaaaaaccaacgccctgtcgcgggctgtgaatcgagtatttcagcaaaactactgcagtaagaa

SEQ ID NO: 4600 - DNA, 152 bp, synthetic construct
  source 1..152: mol_type = other DNA
aatgttgttgatggttggtatttcactataaatataattatttataatcagcaacttaaccacaaaacaaccatatattgatatctcacaaaacaaccataagttgatatttttgtgaatcgagtatttcagcaaaactactgcagtaagaa

SEQ ID NO: 4601 - DNA, 152 bp, synthetic construct
  source 1..152: mol_type = other DNA
aatgttgttgatgcaaccataaagtgatatttaataattatttataatcagcaacttaaccacaaaagttggtatataactatagagacaaaacaaccataagttgatatttttgtgaatcgagtatttcagcaaaactactgcagtaagaa

SEQ ID NO: 4602 - DNA, 152 bp, synthetic construct
  source 1..152: mol_type = other DNA
aatgttgttgatgcaaccataaagtgatatttaataattatttataatcagcaacttaaccacaaaacaaccatatattgatatctcacaaaagttggtattcaactataaaatgtgaatcgagtatttcagcaaaactactgcagtaagaa

SEQ ID NO: 4603 - DNA, 152 bp, synthetic construct
  source 1..152: mol_type = other DNA
aatgttgttgatggttggtatttcactataaatataattatttataatcagcaacttaaccacaaaagttggtatataactatagagacaaaacaaccataagttgatatttttgtgaatcgagtatttcagcaaaactactgcagtaagaa

SEQ ID NO: 4604 - DNA, 152 bp, synthetic construct
  source 1..152: mol_type = other DNA
aatgttgttgatggttggtatttcactataaatataattatttataatcagcaacttaaccacaaaacaaccatatattgatatctcacaaaagttggtattcaactataaaatgtgaatcgagtatttcagcaaaactactgcagtaagaa

SEQ ID NO: 4605 - DNA, 152 bp, synthetic construct
  source 1..152: mol_type = other DNA
aatgttgttgatgcaaccataaagtgatatttaataattatttataatcagcaacttaaccacaaaagttggtatataactatagagacaaaagttggtattcaactataaaatgtgaatcgagtatttcagcaaaactactgcagtaagaa

SEQ ID NO: 4606 - DNA, 152 bp, synthetic construct
  source 1..152: mol_type = other DNA
aatgttgttgatggttggtatttcactataaatataattatttataatcagcaacttaaccacaaaagttggtatataactatagagacaaaagttggtattcaactataaaatgtgaatcgagtatttcagcaaaactactgcagtaagaa

SEQ ID NO: 4607 - DNA, 152 bp, synthetic construct
  source 1..152: mol_type = other DNA
aatgttgttgatgcaaccataaaatgataattaataattatttataatcagcaacttaaccacaaaacaaccataaaatgataattaacaaaagttggtattcaactataaaatgtgaatcgagtatttcagcaaaactactgcagtaagaa

SEQ ID NO: 4608 - DNA, 152 bp, synthetic construct
  source 1..152: mol_type = other DNA
aatgttgttgatgcaaccataaaatgataattaataattatttataatcagcaacttaaccacaaaacacccataaattgataattaacaaaagttggtattcaactataaaatgtgaatcgagtatttcagcaaaactactgcagtaagaa

SEQ ID NO: 4609 - DNA, 152 bp, synthetic construct
  source 1..152: mol_type = other DNA
aatgttgttgatgcaaccataaaatgataattaataattatttataatcagcaacttaaccacaaaacacccataaattgatattgcacaaaagttggtattcaactataaaatgtgaatcgagtatttcagcaaaactactgcagtaagaa

SEQ ID NO: 4610 - DNA, 152 bp, synthetic construct
  source 1..152: mol_type = other DNA
aatgttgttgatgcaaccataaaatgataattaataattatttataatcagcaacttaaccacaaaacaaccataagttgatattttacaaaagttggtattcaactataaaatgtgaatcgagtatttcagcaaaactactgcagtaagaa

SEQ ID NO: 4611 - DNA, 152 bp, synthetic construct
  source 1..152: mol_type = other DNA
aatgttgttgatgcaaccataaaatgataattaataattatttataatcagcaacttaaccacaaaacaaccatatattgatatctcacaaaagttggtattcaactataaaatgtgaatcgagtatttcagcaaaactactgcagtaagaa

SEQ ID NO: 4612 - DNA, 152 bp, synthetic construct
  source 1..152: mol_type = other DNA
aatgttgttgatgcaaccataaaatgataattaataattatttataatcagcaacttaaccacaaaacaaccataaagtgatatttaacaaaagttggtattcaactataaaatgtgaatcgagtatttcagcaaaactactgcagtaagaa

SEQ ID NO: 4613 - DNA, 152 bp, synthetic construct
  source 1..152: mol_type = other DNA
aatgttgttgatgcacccataaattgataattaataattatttataatcagcaacttaaccacaaaacaaccataaaatgataattaacaaaagttggtattcaactataaaatgtgaatcgagtatttcagcaaaactactgcagtaagaa

SEQ ID NO: 4614 - DNA, 152 bp, synthetic construct
  source 1..152: mol_type = other DNA
aatgttgttgatgcacccataaattgataattaataattatttataatcagcaacttaaccacaaaacacccataaattgataattaacaaaagttggtattcaactataaaatgtgaatcgagtatttcagcaaaactactgcagtaagaa

SEQ ID NO: 4615 - DNA, 152 bp, synthetic construct
  source 1..152: mol_type = other DNA
aatgttgttgatgcacccataaattgataattaataattatttataatcagcaacttaaccacaaaacacccataaattgatattgcacaaaagttggtattcaactataaaatgtgaatcgagtatttcagcaaaactactgcagtaagaa

SEQ ID NO: 4616 - DNA, 152 bp, synthetic construct
  source 1..152: mol_type = other DNA
aatgttgttgatgcacccataaattgataattaataattatttataatcagcaacttaaccacaaaacaaccataagttgatattttacaaaagttggtattcaactataaaatgtgaatcgagtatttcagcaaaactactgcagtaagaa

SEQ ID NO: 4617 - DNA, 152 bp, synthetic construct
  source 1..152: mol_type = other DNA
aatgttgttgatgcacccataaattgataattaataattatttataatcagcaacttaaccacaaaacaaccatatattgatatctcacaaaagttggtattcaactataaaatgtgaatcgagtatttcagcaaaactactgcagtaagaa

SEQ ID NO: 4618 - DNA, 152 bp, synthetic construct
  source 1..152: mol_type = other DNA
aatgttgttgatgcacccataaattgataattaataattatttataatcagcaacttaaccacaaaacaaccataaagtgatatttaacaaaagttggtattcaactataaaatgtgaatcgagtatttcagcaaaactactgcagtaagaa

SEQ ID NO: 4619 - DNA, 152 bp, synthetic construct
  source 1..152: mol_type = other DNA
aatgttgttgatgcacccataaattgatattgcataattatttataatcagcaacttaaccacaaaacaaccataaaatgataattaacaaaagttggtattcaactataaaatgtgaatcgagtatttcagcaaaactactgcagtaagaa

SEQ ID NO: 4620 - DNA, 152 bp, synthetic construct
  source 1..152: mol_type = other DNA
aatgttgttgatgcacccataaattgatattgcataattatttataatcagcaacttaaccacaaaacacccataaattgataattaacaaaagttggtattcaactataaaatgtgaatcgagtatttcagcaaaactactgcagtaagaa

SEQ ID NO: 4621 - DNA, 152 bp, synthetic construct
  source 1..152: mol_type = other DNA
aatgttgttgatgcacccataaattgatattgcataattatttataatcagcaacttaaccacaaaacacccataaattgatattgcacaaaagttggtattcaactataaaatgtgaatcgagtatttcagcaaaactactgcagtaagaa

SEQ ID NO: 4622 - DNA, 152 bp, synthetic construct
  source 1..152: mol_type = other DNA
aatgttgttgatgcacccataaattgatattgcataattatttataatcagcaacttaaccacaaaacaaccataagttgatattttacaaaagttggtattcaactataaaatgtgaatcgagtatttcagcaaaactactgcagtaagaa

SEQ ID NO: 4623 - DNA, 152 bp, synthetic construct
  source 1..152: mol_type = other DNA
aatgttgttgatgcacccataaattgatattgcataattatttataatcagcaacttaaccacaaaacaaccatatattgatatctcacaaaagttggtattcaactataaaatgtgaatcgagtatttcagcaaaactactgcagtaagaa

SEQ ID NO: 4624 - DNA, 152 bp, synthetic construct
  source 1..152: mol_type = other DNA
aatgttgttgatgcacccataaattgatattgcataattatttataatcagcaacttaaccacaaaacaaccataaagtgatatttaacaaaagttggtattcaactataaaatgtgaatcgagtatttcagcaaaactactgcagtaagaa

SEQ ID NO: 4625 - DNA, 152 bp, synthetic construct
  source 1..152: mol_type = other DNA
aatgttgttgatgcaaccataagttgatattttataattatttataatcagcaacttaaccacaaaacaaccataaaatgataattaacaaaagttggtattcaactataaaatgtgaatcgagtatttcagcaaaactactgcagtaagaa

SEQ ID NO: 4626 - DNA, 152 bp, synthetic construct
  source 1..152: mol_type = other DNA
aatgttgttgatgcaaccataagttgatattttataattatttataatcagcaacttaaccacaaaacacccataaattgataattaacaaaagttggtattcaactataaaatgtgaatcgagtatttcagcaaaactactgcagtaagaa

SEQ ID NO: 4627 - DNA, 152 bp, synthetic construct
  source 1..152: mol_type = other DNA
aatgttgttgatgcaaccataagttgatattttataattatttataatcagcaacttaaccacaaaacacccataaattgatattgcacaaaagttggtattcaactataaaatgtgaatcgagtatttcagcaaaactactgcagtaagaa

SEQ ID NO: 4628 - DNA, 152 bp, synthetic construct
  source 1..152: mol_type = other DNA
aatgttgttgatgcaaccataagttgatattttataattatttataatcagcaacttaaccacaaaacaaccataagttgatattttacaaaagttggtattcaactataaaatgtgaatcgagtatttcagcaaaactactgcagtaagaa

SEQ ID NO: 4629 - DNA, 152 bp, synthetic construct
  source 1..152: mol_type = other DNA
aatgttgttgatgcaaccataagttgatattttataattatttataatcagcaacttaaccacaaaacaaccatatattgatatctcacaaaagttggtattcaactataaaatgtgaatcgagtatttcagcaaaactactgcagtaagaa

SEQ ID NO: 4630 - DNA, 152 bp, synthetic construct
  source 1..152: mol_type = other DNA
aatgttgttgatgcaaccataagttgatattttataattatttataatcagcaacttaaccacaaaacaaccataaagtgatatttaacaaaagttggtattcaactataaaatgtgaatcgagtatttcagcaaaactactgcagtaagaa

SEQ ID NO: 4631 - DNA, 152 bp, synthetic construct
  source 1..152: mol_type = other DNA
aatgttgttgatgcaaccatatattgatatctcataattatttataatcagcaacttaaccacaaaacaaccataaaatgataattaacaaaagttggtattcaactataaaatgtgaatcgagtatttcagcaaaactactgcagtaagaa

SEQ ID NO: 4632 - DNA, 152 bp, synthetic construct
  source 1..152: mol_type = other DNA
aatgttgttgatgcaaccatatattgatatctcataattatttataatcagcaacttaaccacaaaacacccataaattgataattaacaaaagttggtattcaactataaaatgtgaatcgagtatttcagcaaaactactgcagtaagaa

SEQ ID NO: 4633 - DNA, 152 bp, synthetic construct
  source 1..152: mol_type = other DNA
aatgttgttgatgcaaccatatattgatatctcataattatttataatcagcaacttaaccacaaaacacccataaattgatattgcacaaaagttggtattcaactataaaatgtgaatcgagtatttcagcaaaactactgcagtaagaa

SEQ ID NO: 4634 - DNA, 152 bp, synthetic construct
  source 1..152: mol_type = other DNA
aatgttgttgatgcaaccatatattgatatctcataattatttataatcagcaacttaaccacaaaacaaccataagttgatattttacaaaagttggtattcaactataaaatgtgaatcgagtatttcagcaaaactactgcagtaagaa

SEQ ID NO: 4635 - DNA, 152 bp, synthetic construct
  source 1..152: mol_type = other DNA
aatgttgttgatgcaaccatatattgatatctcataattatttataatcagcaacttaaccacaaaacaaccatatattgatatctcacaaaagttggtattcaactataaaatgtgaatcgagtatttcagcaaaactactgcagtaagaa

SEQ ID NO: 4636 - DNA, 152 bp, synthetic construct
  source 1..152: mol_type = other DNA
aatgttgttgatgcaaccatatattgatatctcataattatttataatcagcaacttaaccacaaaacaaccataaagtgatatttaacaaaagttggtattcaactataaaatgtgaatcgagtatttcagcaaaactactgcagtaagaa

SEQ ID NO: 4637 - DNA, 152 bp, synthetic construct
  source 1..152: mol_type = other DNA
aatgttgttgatgcaaccataaagtgatatttaataattatttataatcagcaacttaaccacaaaacaaccataaaatgataattaacaaaagttggtattcaactataaaatgtgaatcgagtatttcagcaaaactactgcagtaagaa

SEQ ID NO: 4638 - DNA, 152 bp, synthetic construct
  source 1..152: mol_type = other DNA
aatgttgttgatgcaaccataaagtgatatttaataattatttataatcagcaacttaaccacaaaacacccataaattgataattaacaaaagttggtattcaactataaaatgtgaatcgagtatttcagcaaaactactgcagtaagaa

SEQ ID NO: 4639 - DNA, 152 bp, synthetic construct
  source 1..152: mol_type = other DNA
aatgttgttgatgcaaccataaagtgatatttaataattatttataatcagcaacttaaccacaaaacacccataaattgatattgcacaaaagttggtattcaactataaaatgtgaatcgagtatttcagcaaaactactgcagtaagaa

SEQ ID NO: 4640 - DNA, 152 bp, synthetic construct
  source 1..152: mol_type = other DNA
aatgttgttgatgcaaccataaagtgatatttaataattatttataatcagcaacttaaccacaaaacaaccataagttgatattttacaaaagttggtattcaactataaaatgtgaatcgagtatttcagcaaaactactgcagtaagaa

SEQ ID NO: 4641 - DNA, 152 bp, synthetic construct
  source 1..152: mol_type = other DNA
aatgttgttgatgcaaccataaagtgatatttaataattatttataatcagcaacttaaccacaaaacaaccataaagtgatatttaacaaaagttggtattcaactataaaatgtgaatcgagtatttcagcaaaactactgcagtaagaa

SEQ ID NO: 4642 - DNA, 152 bp, synthetic construct
  source 1..152: mol_type = other DNA
aatgttgttgatgcaaccataaaatgataattaataattatttataatcagcaacttaaccacaaaacaaccataaaatgataattaacaaaataattatcattttatggttgtgtgaatcgagtatttcagcaaaactactgcagtaagaa

SEQ ID NO: 4643 - DNA, 152 bp, synthetic construct
  source 1..152: mol_type = other DNA
aatgttgttgatgcaaccataaaatgataattaataattatttataatcagcaacttaaccacaaaataattatcattttatggttgacaaaacaaccataaaatgataattatgtgaatcgagtatttcagcaaaactactgcagtaagaa

SEQ ID NO: 4644 - DNA, 152 bp, synthetic construct
  source 1..152: mol_type = other DNA
aatgttgttgatgtaattatcattttatggttgataattatttataatcagcaacttaaccacaaaacaaccataaaatgataattaacaaaacaaccataaaatgataattatgtgaatcgagtatttcagcaaaactactgcagtaagaa

SEQ ID NO: 4645 - DNA, 152 bp, synthetic construct
  source 1..152: mol_type = other DNA
aatgttgttgatgcaaccataaaatgataattaataattatttataatcagcaacttaaccacaaaataattatcattttatggttgacaaaataattatcattttatggttgtgtgaatcgagtatttcagcaaaactactgcagtaagaa

SEQ ID NO: 4646 - DNA, 152 bp, synthetic construct
  source 1..152: mol_type = other DNA
aatgttgttgatgtaattatcattttatggttgataattatttataatcagcaacttaaccacaaaataattatcattttatggttgacaaaacaaccataaaatgataattatgtgaatcgagtatttcagcaaaactactgcagtaagaa

SEQ ID NO: 4647 - DNA, 152 bp, synthetic construct
  source 1..152: mol_type = other DNA
aatgttgttgatgtaattatcattttatggttgataattatttataatcagcaacttaaccacaaaacaaccataaaatgataattaacaaaataattatcattttatggttgtgtgaatcgagtatttcagcaaaactactgcagtaagaa

SEQ ID NO: 4648 - DNA, 152 bp, synthetic construct
  source 1..152: mol_type = other DNA
aatgttgttgatgtaattatcattttatggttgataattatttataatcagcaacttaaccacaaaataattatcattttatggttgacaaaataattatcattttatggttgtgtgaatcgagtatttcagcaaaactactgcagtaagaa

SEQ ID NO: 4649 - DNA, 152 bp, synthetic construct
  source 1..152: mol_type = other DNA
aatgttgttgatgcaaccataaaatgataattaataattatttataatcagcaacttaaccacaaaacaaccataaaatgataattattttgtcaaccataaaatgataattatgtgaatcgagtatttcagcaaaactactgcagtaagaa

SEQ ID NO: 4650 - DNA, 152 bp, synthetic construct
  source 1..152: mol_type = other DNA
aatgttgttgatgtaattatcattttatggttgataattatttataatcagcaacttaaccacaaaacaaccataaaatgataattattttgtcaaccataaaatgataattatgtgaatcgagtatttcagcaaaactactgcagtaagaa

SEQ ID NO: 4651 - DNA, 152 bp, synthetic construct
  source 1..152: mol_type = other DNA
aatgttgttgatgcaaccataaagtgatatttacaaccataaagtgatatttaacttaaccacaaaacaaccatatattgatatctcacaaaacaaccataagttgatatttttgtgaatcgagtatttcagcaaaactactgcagtaagaa

SEQ ID NO: 4652 - DNA, 152 bp, synthetic construct
  source 1..152: mol_type = other DNA
aatgttgttgatgcaaccataaagtgatatttaacaaccataaagtgatatttaacttaaccacaaacaaccatatattgatatctcacaaaacaaccataagttgatatttttgtgaatcgagtatttcagcaaaactactgcagtaagaa

SEQ ID NO: 4653 - DNA, 152 bp, synthetic construct
  source 1..152: mol_type = other DNA
aatgttgttgatgcaaccataaagtgatatttaatcaaccataaagtgatatttaacttaaccacaacaaccatatattgatatctcacaaaacaaccataagttgatatttttgtgaatcgagtatttcagcaaaactactgcagtaagaa

SEQ ID NO: 4654 - DNA, 152 bp, synthetic construct
  source 1..152: mol_type = other DNA
aatgttgttgatgcaaccataaagtgatatttaatacaaccataaagtgatatttaacttaaccacacaaccatatattgatatctcacaaaacaaccataagttgatatttttgtgaatcgagtatttcagcaaaactactgcagtaagaa

SEQ ID NO: 4655 - DNA, 152 bp, synthetic construct
  source 1..152: mol_type = other DNA
aatgttgttgatgcaaccataaagtgatatttaataacaaccataaagtgatatttaacttaaccaccaaccatatattgatatctcacaaaacaaccataagttgatatttttgtgaatcgagtatttcagcaaaactactgcagtaagaa

SEQ ID NO: 4656 - DNA, 152 bp, synthetic construct
  source 1..152: mol_type = other DNA
aatgttgttgatgcaaccataaagtgatatttaataatcaaccataaagtgatatttaacttaaccacaaccatatattgatatctcacaaaacaaccataagttgatatttttgtgaatcgagtatttcagcaaaactactgcagtaagaa

SEQ ID NO: 4657 - DNA, 152 bp, synthetic construct
  source 1..152: mol_type = other DNA
aatgttgttgatgcaaccataaagtgatatttaataattcaaccataaagtgatatttaacttaacccaaccatatattgatatctcacaaaacaaccataagttgatatttttgtgaatcgagtatttcagcaaaactactgcagtaagaa

SEQ ID NO: 4658 - DNA, 152 bp, synthetic construct
  source 1..152: mol_type = other DNA
aatgttgttgatgcaaccataaagtgatatttaataattacaaccataaagtgatatttaacttaaccaaccatatattgatatctcacaaaacaaccataagttgatatttttgtgaatcgagtatttcagcaaaactactgcagtaagaa

SEQ ID NO: 4659 - DNA, 152 bp, synthetic construct
  source 1..152: mol_type = other DNA
aatgttgttgatgcaaccataaagtgatatttaataattatcaaccataaagtgatatttaacttaacaaccatatattgatatctcacaaaacaaccataagttgatatttttgtgaatcgagtatttcagcaaaactactgcagtaagaa

SEQ ID NO: 4660 - DNA, 152 bp, synthetic construct
  source 1..152: mol_type = other DNA
aatgttgttgatgcaaccataaagtgatatttaataattattcaaccataaagtgatatttaacttacaaccatatattgatatctcacaaaacaaccataagttgatatttttgtgaatcgagtatttcagcaaaactactgcagtaagaa

SEQ ID NO: 4661 - DNA, 152 bp, synthetic construct
  source 1..152: mol_type = other DNA
aatgttgttgatgcaaccataaagtgatatttaataattatttcaaccataaagtgatatttaacttcaaccatatattgatatctcacaaaacaaccataagttgatatttttgtgaatcgagtatttcagcaaaactactgcagtaagaa

SEQ ID NO: 4662 - DNA, 152 bp, synthetic construct
  source 1..152: mol_type = other DNA
aatgttgttgatgcaaccataaagtgatatttaataattatttacaaccataaagtgatatttaactcaaccatatattgatatctcacaaaacaaccataagttgatatttttgtgaatcgagtatttcagcaaaactactgcagtaagaa

SEQ ID NO: 4663 - DNA, 152 bp, synthetic construct
  source 1..152: mol_type = other DNA
aatgttgttgatgcaaccataaagtgatatttaataattatttatcaaccataaagtgatatttaaccaaccatatattgatatctcacaaaacaaccataagttgatatttttgtgaatcgagtatttcagcaaaactactgcagtaagaa

SEQ ID NO: 4664 - DNA, 152 bp, synthetic construct
  source 1..152: mol_type = other DNA
aatgttgttgatgcaaccataaagtgatatttaataattatttatacaaccataaagtgatatttaacaaccatatattgatatctcacaaaacaaccataagttgatatttttgtgaatcgagtatttcagcaaaactactgcagtaagaa

SEQ ID NO: 4665 - DNA, 152 bp, synthetic construct
  source 1..152: mol_type = other DNA
aatgttgttgatgcaaccataaagtgatatttaataattatttataacaaccataaagtgatatttacaaccatatattgatatctcacaaaacaaccataagttgatatttttgtgaatcgagtatttcagcaaaactactgcagtaagaa

SEQ ID NO: 4666 - DNA, 152 bp, synthetic construct; identical to SEQ ID NO: 4054
  source 1..152: mol_type = other DNA

SEQ ID NO: 4667 - DNA, 152 bp, synthetic construct; identical to SEQ ID NO: 4040
  source 1..152: mol_type = other DNA

SEQ ID NO: 4668 - DNA, 152 bp, synthetic construct; identical to SEQ ID NO: 4038
  source 1..152: mol_type = other DNA

SEQ ID NO: 4669 - DNA, 152 bp, synthetic construct; identical to SEQ ID NO: 4042
  source 1..152: mol_type = other DNA

SEQ ID NO: 4670 - DNA, 152 bp, synthetic construct; identical to SEQ ID NO: 4044
  source 1..152: mol_type = other DNA

SEQ ID NO: 4671 - DNA, 152 bp, synthetic construct; identical to SEQ ID NO: 4039
  source 1..152: mol_type = other DNA

SEQ ID NO: 4672 - DNA, 152 bp, synthetic construct; identical to SEQ ID NO: 4043
  source 1..152: mol_type = other DNA

SEQ ID NO: 4673 - DNA, 152 bp, synthetic construct; identical to SEQ ID NO: 4052
  source 1..152: mol_type = other DNA

SEQ ID NO: 4674 - DNA, 250 bp, synthetic construct
  source 1..250: mol_type = other DNA
tgaagctcgcattacagtgcttagcttagcttgtggccaccagtcacatttcccgaaaagtgccacctgctagatgtcgctgcaagcaaagcgtgacatacactggataggcatatcaataacttacaaaaaacctgcaaccattcactgacataaaatgcaaccatacagtgacatagtgaaataaaagttataacgctaaaaacaaaaaaaccagcccgcacatgactgcttactgcgtgtcagagag

SEQ ID NO: 4675 - DNA, 250 bp, synthetic construct
  source 1..250: mol_type = other DNA
tgaagctcgcattacagtgcttagcttagcttgtggccaccagtcacatttcccgaaaagtgccacctgctagatgtcgcagcaagcaaagcgtgacatacactggataggcatatcaataacttacaaaaaaccagcaaccattcactgacataaaaagcaaccatacagtgacatagtgaaataaaagttataacgctaaaaacaaaaaaaccagcccgcttcattagacttactgcgtgtcagagag

SEQ ID NO: 4676 - DNA, 250 bp, synthetic construct
  source 1..250: mol_type = other DNA
tgaagctcgcattacagtgcttagcttagcttgtggccaccagtcacatttcccgaaaagtgccacctgctagatgtcgctccaagcaaagcgtgacatacactggataggcatatcaataacttacaaaaaacctccaaccattcactgacataaaatccaaccatacagtgacatagtgaaataaaagttataacgctaaaaacaaaaaaaccagcccgctacgtctaacttactgcgtgtcagagag

SEQ ID NO: 4677 - DNA, 250 bp, synthetic construct
  source 1..250: mol_type = other DNA
tgaagctcgcattacagtgcttagcttagcttgtggccaccagtcacatttcccgaaaagtgccacctgctagatgtcgctggaagcaaagcgtgacatacactggataggcatatcaataacttacaaaaaacctggaaccattcactgacataaaatggaaccatacagtgacatagtgaaataaaagttataacgctaaaaacaaaaaaaccagcccgcctgggaggccttactgcgtgtcagagag

SEQ ID NO: 4678 - DNA, 250 bp, synthetic construct
  source 1..250: mol_type = other DNA
tgaagctcgcattacagtgcttagcttagcttgtggccaccagtcacatttcccgaaaagtgccacctgctagatgtcgctgctagcaaagcgtgacatacactggataggcatatcaataacttacaaaaaacctgctaccattcactgacataaaatgctaccatacagtgacatagtgaaataaaagttataacgctaaaaacaaaaaaaccagcccgacgtataggccttactgcgtgtcagagag

SEQ ID NO: 4679 - DNA, 250 bp, synthetic construct
  source 1..250: mol_type = other DNA
tgaagctcgcattacagtgcttagcttagcttgtggccaccagtcacatttcccgaaaagtgccacctgctagatgtcgctgcatgcaaagcgtgacatacactggataggcatatcaataacttacaaaaaacctgcatccattcactgacataaaatgcatccatacagtgacatagtgaaataaaagttataacgctaaaaacaaaaaaaccagcccgcgtgcttttgcttactgcgtgtcagagag

SEQ ID NO: 4680 - DNA, 250 bp, synthetic construct
  source 1..250: mol_type = other DNA
tgaagctcgcattacagtgcttagcttagcttgtggccaccagtcacatttcccgaaaagtgccacctgctagatgtcgctgcaaccaaagcgtgacatacactggataggcatatcaataacttacaaaaaacctgcaagcattcactgacataaaatgcaagcatacagtgacatagtgaaataaaagttataacgctaaaaacaaaaaaaccagcccggcgagagtgccttactgcgtgtcagagag

SEQ ID NO: 4681 - DNA, 250 bp, synthetic construct
  source 1..250: mol_type = other DNA
tgaagctcgcattacagtgcttagcttagcttgtggccaccagtcacatttcccgaaaagtgccacctgctagatgtcgctgcaaggaaagcgtgacatacactggataggcatatcaataacttacaaaaaacctgcaacgattcactgacataaaatgcaacgatacagtgacatagtgaaataaaagttataacgctaaaaacaaaaaaaccagcccggatcagtcttcttactgcgtgtcagagag

SEQ ID NO: 4682 - DNA, 250 bp, synthetic construct
  source 1..250: mol_type = other DNA
tgaagctcgcattacagtgcttagcttagcttgtggccaccagtcacatttcccgaaaagtgccacctgctagatgtcgctgcaagctaagcgtgacatacactggataggcatatcaataacttacaaaaaacctgcaacctttcactgacataaaatgcaaccttacagtgacatagtgaaataaaagttataacgctaaaaacaaaaaaaccagcccgcctttgtcctcttactgcgtgtcagagag

SEQ ID NO: 4683 - DNA, 250 bp, synthetic construct
  source 1..250: mol_type = other DNA
tgaagctcgcattacagtgcttagcttagcttgtggccaccagtcacatttcccgaaaagtgccacctgctagatgtcgctgcaagcatagcgtgacatacactggataggcatatcaataacttacaaaaaacctgcaaccaatcactgacataaaatgcaaccaaacagtgacatagtgaaataaaagttataacgctaaaaacaaaaaaaccagcccgacgaaccgtgcttactgcgtgtcagagag

SEQ ID NO: 4684 - DNA, 250 bp, synthetic construct
  source 1..250: mol_type = other DNA
tgaagctcgcattacagtgcttagcttagcttgtggccaccagtcacatttcccgaaaagtgccacctgctagatgtcgctgcaagcaatgcgtgacatacactggataggcatatcaataacttacaaaaaacctgcaaccatacactgacataaaatgcaaccattcagtgacatagtgaaataaaagttataacgctaaaaacaaaaaaaccagcccgggctcaggcccttactgcgtgtcagagag

SEQ ID NO: 4685 - DNA, 250 bp, synthetic construct
  source 1..250: mol_type = other DNA
tgaagctcgcattacagtgcttagcttagcttgtggccaccagtcacatttcccgaaaagtgccacctgctagatgtcgctgcaagcaaaccgtgacatacactggataggcatatcaataacttacaaaaaacctgcaaccattgactgacataaaatgcaaccatagagtgacatagtgaaataaaagttataacgctaaaaacaaaaaaaccagcccgcggccggcaacttactgcgtgtcagagag

SEQ ID NO: 4686 - DNA, 250 bp, synthetic construct
  source 1..250: mol_type = other DNA
tgaagctcgcattacagtgcttagcttagcttgtggccaccagtcacatttcccgaaaagtgccacctgctagatgtcgctgcaagcaaagggtgacatacactggataggcatatcaataacttacaaaaaacctgcaaccattctctgacataaaatgcaaccatactgtgacatagtgaaataaaagttataacgctaaaaacaaaaaaaccagcccgaacttaacgacttactgcgtgtcagagag

SEQ ID NO: 4687 - DNA, 250 bp, synthetic construct
  source 1..250: mol_type = other DNA
tgaagctcgcattacagtgcttagcttagcttgtggccaccagtcacatttcccgaaaagtgccacctgctagatgtcgctgcaagcaaagcctgacatacactggataggcatatcaataacttacaaaaaacctgcaaccattcagtgacataaaatgcaaccatacactgacatagtgaaataaaagttataacgctaaaaacaaaaaaaccagcccgcgagatgcctcttactgcgtgtcagagag

SEQ ID NO: 4688 - DNA, 250 bp, synthetic construct
  source 1..250: mol_type = other DNA
tgaagctcgcattacagtgcttagcttagcttgtggccaccagtcacatttcccgaaaagtgccacctgctagatgtcgctgcaagcaaagcgagacatacactggataggcatatcaataacttacaaaaaacctgcaaccattcacagacataaaatgcaaccatacagagacatagtgaaataaaagttataacgctaaaaacaaaaaaaccagcccgcgctattcctcttactgcgtgtcagagag

SEQ ID NO: 4689 - DNA, 250 bp, synthetic construct
  source 1..250: mol_type = other DNA
tgaagctcgcattacagtgcttagcttagcttgtggccaccagtcacatttcccgaaaagtgccacctgctagatgtcgctgcaagcaaagcgtcacatacactggataggcatatcaataacttacaaaaaacctgcaaccattcactcacataaaatgcaaccatacagtcacatagtgaaataaaagttataacgctaaaaacaaaaaaaccagcccggaacaacatgcttactgcgtgtcagagag

SEQ ID NO: 4690 - DNA, 250 bp, synthetic construct
  source 1..250: mol_type = other DNA
tgaagctcgcattacagtgcttagcttagcttgtggccaccagtcacatttcccgaaaagtgccacctgctagatgtcgctgcaagcaaagcgtgtcatacactggataggcatatcaataacttacaaaaaacctgcaaccattcactgtcataaaatgcaaccatacagtgtcatagtgaaataaaagttataacgctaaaaacaaaaaaaccagcccgttctgatggacttactgcgtgtcagagag

SEQ ID NO: 4691 - DNA, 250 bp, synthetic construct
  source 1..250: mol_type = other DNA
tgaagctcgcattacagtgcttagcttagcttgtggccaccagtcacatttcccgaaaagtgccacctgctagatgtcgctgcaagcaaagcgtgagatacactggataggcatatcaataacttacaaaaaacctgcaaccattcactgagataaaatgcaaccatacagtgagatagtgaaataaaagttataacgctaaaaacaaaaaaaccagcccgagtaagtcgtcttactgcgtgtcagagag

SEQ ID NO: 4692 - DNA, 250 bp, synthetic construct
  source 1..250: mol_type = other DNA
tgaagctcgcattacagtgcttagcttagcttgtggccaccagtcacatttcccgaaaagtgccacctgctagatgtcgctgcaagcaaagcgtgacttacactggataggcatatcaataacttacaaaaaacctgcaaccattcactgacttaaaatgcaaccatacagtgacttagtgaaataaaagttataacgctaaaaacaaaaaaaccagcccgatcggagctacttactgcgtgtcagagag

SEQ ID NO: 4693 - DNA, 250 bp, synthetic construct
  source 1..250: mol_type = other DNA
tgaagctcgcattacagtgcttagcttagcttgtggccaccagtcacatttcccgaaaagtgccacctgctagatgtcgctgcaagcaaagcgtgacaaacactggataggcatatcaataacttacaaaaaacctgcaaccattcactgacaaaaaatgcaaccatacagtgacaaagtgaaataaaagttataacgctaaaaacaaaaaaaccagcccgatgagggaaacttactgcgtgtcagagag

SEQ ID NO: 4694 - DNA, 250 bp, synthetic construct
  source 1..250: mol_type = other DNA
tgaagctcgcattacagtgcttagcttagcttgtggccaccagtcacatttcccgaaaagtgccacctgctagatgtcgctgcaagcaaagcgtgacattcactggataggcatatcaataacttacaaaaaacctgcaaccattcactgacattaaatgcaaccatacagtgacattgtgaaataaaagttataacgctaaaaacaaaaaaaccagcccgtctcaacccccttactgcgtgtcagagag

SEQ ID NO: 4695 - DNA, 250 bp, synthetic construct
  source 1..250: mol_type = other DNA
tgaagctcgcattacagtgcttagcttagcttgtggccaccagtcacatttcccgaaaagtgccacctgctagatgtcgcggcaagcaaagcgtgacatacactggataggcatatcaataacttacaaaaaaccggcaaccattcactgacataaaaggcaaccatacagtgacatagtgaaataaaagttataacgctaaaaacaaaaaaaccagcccggcttttcatacttactgcgtgtcagagag

SEQ ID NO: 4696 - DNA, 250 bp, synthetic construct
  source 1..250: mol_type = other DNA
tgaagctcgcattacagtgcttagcttagcttgtggccaccagtcacatttcccgaaaagtgccacctgctagatgtcgcttcaagcaaagcgtgacatacactggataggcatatcaataacttacaaaaaaccttcaaccattcactgacataaaattcaaccatacagtgacatagtgaaataaaagttataacgctaaaaacaaaaaaaccagcccgccccacgatgcttactgcgtgtcagagag

SEQ ID NO: 4697 - DNA, 250 bp, synthetic construct
  source 1..250: mol_type = other DNA
tgaagctcgcattacagtgcttagcttagcttgtggccaccagtcacatttcccgaaaagtgccacctgctagatgtcgctgaaagcaaagcgtgacatacactggataggcatatcaataacttacaaaaaacctgaaaccattcactgacataaaatgaaaccatacagtgacatagtgaaataaaagttataacgctaaaaacaaaaaaaccagcccggaattgcagccttactgcgtgtcagagag

SEQ ID NO: 4698 - DNA, 250 bp, synthetic construct
  source 1..250: mol_type = other DNA
tgaagctcgcattacagtgcttagcttagcttgtggccaccagtcacatttcccgaaaagtgccacctgctagatgtcgctgccagcaaagcgtgacatacactggataggcatatcaataacttacaaaaaacctgccaccattcactgacataaaatgccaccatacagtgacatagtgaaataaaagttataacgctaaaaacaaaaaaaccagcccgctgggtggcacttactgcgtgtcagagag

SEQ ID NO: 4699 - DNA, 250 bp, synthetic construct
  source 1..250: mol_type = other DNA
tgaagctcgcattacagtgcttagcttagcttgtggccaccagtcacatttcccgaaaagtgccacctgctagatgtcgctgcacgcaaagcgtgacatacactggataggcatatcaataacttacaaaaaacctgcacccattcactgacataaaatgcacccatacagtgacatagtgaaataaaagttataacgctaaaaacaaaaaaaccagcccggtcttagaggcttactgcgtgtcagagag

SEQ ID NO: 4700 - DNA, 250 bp, synthetic construct
  source 1..250: mol_type = other DNA
tgaagctcgcattacagtgcttagcttagcttgtggccaccagtcacatttcccgaaaagtgccacctgctagatgtcgctgcaatcaaagcgtgacatacactggataggcatatcaataacttacaaaaaacctgcaaacattcactgacataaaatgcaaacatacagtgacatagtgaaataaaagttataacgctaaaaacaaaaaaaccagcccgtaagtcgtttcttactgcgtgtcagagag

SEQ ID NO: 4701 - DNA, 250 bp, synthetic construct
  source 1..250: mol_type = other DNA
tgaagctcgcattacagtgcttagcttagcttgtggccaccagtcacatttcccgaaaagtgccacctgctagatgtcgctgcaagaaaagcgtgacatacactggataggcatatcaataacttacaaaaaacctgcaacaattcactgacataaaatgcaacaatacagtgacatagtgaaataaaagttataacgctaaaaacaaaaaaaccagcccgattttggaagcttactgcgtgtcagagag

SEQ ID NO: 4702 - DNA, 250 bp, synthetic construct
  source 1..250: mol_type = other DNA
tgaagctcgcattacagtgcttagcttagcttgtggccaccagtcacatttcccgaaaagtgccacctgctagatgtcgctgcaagccaagcgtgacatacactggataggcatatcaataacttacaaaaaacctgcaacccttcactgacataaaatgcaaccctacagtgacatagtgaaataaaagttataacgctaaaaacaaaaaaaccagcccggctccgacgccttactgcgtgtcagagag

SEQ ID NO: 4703 - DNA, 250 bp, synthetic construct
  source 1..250: mol_type = other DNA
tgaagctcgcattacagtgcttagcttagcttgtggccaccagtcacatttcccgaaaagtgccacctgctagatgtcgctgcaagcacagcgtgacatacactggataggcatatcaataacttacaaaaaacctgcaaccagtcactgacataaaatgcaaccagacagtgacatagtgaaataaaagttataacgctaaaaacaaaaaaaccagcccgcgctaatcaccttactgcgtgtcagagag

SEQ ID NO: 4704 - DNA, 250 bp, synthetic construct
  source 1..250: mol_type = other DNA
tgaagctcgcattacagtgcttagcttagcttgtggccaccagtcacatttcccgaaaagtgccacctgctagatgtcgctgcaagcaacgcgtgacatacactggataggcatatcaataacttacaaaaaacctgcaaccatgcactgacataaaatgcaaccatccagtgacatagtgaaataaaagttataacgctaaaaacaaaaaaaccagcccgggaataacgccttactgcgtgtcagagag

SEQ ID NO: 4705 - DNA, 250 bp, synthetic construct
  source 1..250: mol_type = other DNA
tgaagctcgcattacagtgcttagcttagcttgtggccaccagtcacatttcccgaaaagtgccacctgctagatgtcgctgcaagcaaatcgtgacatacactggataggcatatcaataacttacaaaaaacctgcaaccattaactgacataaaatgcaaccataaagtgacatagtgaaataaaagttataacgctaaaaacaaaaaaaccagcccgtctcgaccttcttactgcgtgtcagagag

SEQ ID NO: 4706 - DNA, 250 bp, synthetic construct
  source 1..250: mol_type = other DNA
tgaagctcgcattacagtgcttagcttagcttgtggccaccagtcacatttcccgaaaagtgccacctgctagatgtcgctgcaagcaaagagtgacatacactggataggcatatcaataacttacaaaaaacctgcaaccattccctgacataaaatgcaaccataccgtgacatagtgaaataaaagttataacgctaaaaacaaaaaaaccagcccgcctgcttattcttactgcgtgtcagagag

SEQ ID NO: 4707 - DNA, 250 bp, synthetic construct
  source 1..250: mol_type = other DNA
tgaagctcgcattacagtgcttagcttagcttgtggccaccagtcacatttcccgaaaagtgccacctgctagatgtcgctgcaagcaaagcttgacatacactggataggcatatcaataacttacaaaaaacctgcaaccattcaatgacataaaatgcaaccatacattgacatagtgaaataaaagttataacgctaaaaacaaaaaaaccagcccgattgccgggtcttactgcgtgtcagagag

SEQ ID NO: 4708 - DNA, 250 bp, synthetic construct
  source 1..250: mol_type = other DNA
tgaagctcgcattacagtgcttagcttagcttgtggccaccagtcacatttcccgaaaagtgccacctgctagatgtcgctgcaagcaaagcgggacatacactggataggcatatcaataacttacaaaaaacctgcaaccattcacggacataaaatgcaaccatacagggacatagtgaaataaaagttataacgctaaaaacaaaaaaaccagcccgtgctatttaccttactgcgtgtcagagag

SEQ ID NO: 4709 - DNA, 250 bp, synthetic construct
  source 1..250: mol_type = other DNA
tgaagctcgcattacagtgcttagcttagcttgtggccaccagtcacatttcccgaaaagtgccacctgctagatgtcgctgcaagcaaagcgttacatacactggataggcatatcaataacttacaaaaaacctgcaaccattcacttacataaaatgcaaccatacagttacatagtgaaataaaagttataacgctaaaaacaaaaaaaccagcccgttagtcgcgccttactgcgtgtcagagag

SEQ ID NO: 4710 - DNA, 250 bp, synthetic construct
  source 1..250: mol_type = other DNA
tgaagctcgcattacagtgcttagcttagcttgtggccaccagtcacatttcccgaaaagtgccacctgctagatgtcgctgcaagcaaagcgtgccatacactggataggcatatcaataacttacaaaaaacctgcaaccattcactgccataaaatgcaaccatacagtgccatagtgaaataaaagttataacgctaaaaacaaaaaaaccagcccgtccaccaaaccttactgcgtgtcagagag

SEQ ID NO: 4711 - DNA, 250 bp, synthetic construct
  source 1..250: mol_type = other DNA
tgaagctcgcattacagtgcttagcttagcttgtggccaccagtcacatttcccgaaaagtgccacctgctagatgtcgctgcaagcaaagcgtgaaatacactggataggcatatcaataacttacaaaaaacctgcaaccattcactgaaataaaatgcaaccatacagtgaaatagtgaaataaaagttataacgctaaaaacaaaaaaaccagcccgccgagcaggtcttactgcgtgtcagagag

SEQ ID NO: 4712 - DNA, 250 bp, synthetic construct
  source 1..250: mol_type = other DNA
tgaagctcgcattacagtgcttagcttagcttgtggccaccagtcacatttcccgaaaagtgccacctgctagatgtcgctgcaagcaaagcgtgacctacactggataggcatatcaataacttacaaaaaacctgcaaccattcactgacctaaaatgcaaccatacagtgacctagtgaaataaaagttataacgctaaaaacaaaaaaaccagcccgacgttagcgccttactgcgtgtcagagag

SEQ ID NO: 4713 - DNA, 250 bp, synthetic construct
  source 1..250: mol_type = other DNA
tgaagctcgcattacagtgcttagcttagcttgtggccaccagtcacatttcccgaaaagtgccacctgctagatgtcgctgcaagcaaagcgtgacagacactggataggcatatcaataacttacaaaaaacctgcaaccattcactgacagaaaatgcaaccatacagtgacagagtgaaataaaagttataacgctaaaaacaaaaaaaccagcccgcagcaagtttcttactgcgtgtcagagag

SEQ ID NO: 4714 - DNA, 250 bp, synthetic construct
  source 1..250: mol_type = other DNA
tgaagctcgcattacagtgcttagcttagcttgtggccaccagtcacatttcccgaaaagtgccacctgctagatgtcgctgcaagcaaagcgtgacatccactggataggcatatcaataacttacaaaaaacctgcaaccattcactgacatcaaatgcaaccatacagtgacatcgtgaaataaaagttataacgctaaaaacaaaaaaaccagcccgacaaactgatcttactgcgtgtcagagag

SEQ ID NO: 4715 - DNA, 250 bp, synthetic construct
  source 1..250: mol_type = other DNA
tgaagctcgcattacagtgcttagcttagcttgtggccaccagtcacatttcccgaaaagtgccacctgctagatgtcgctgcaagcaaagcgtgacataatattcgcgaaaatttcaataacttacaaaaaacctgcaaccattcactgacataaaatgcaaccatacagtgacatagtgaaataaaagttataacgctaaaaacaaaaaaaccagcccgcaacgtagtacttactgcgtgtcagagag

SEQ ID NO: 4716 - DNA, 250 bp, synthetic construct
  source 1..250: mol_type = other DNA
tgaagctcgcattacagtgcttagcttagcttgtggccaccagtcacatttcccgaaaagtgccacctgctagatgtcgctgcaagcaaagcgtgacatacaatattcgcgaaaattaataacttacaaaaaacctgcaaccattcactgacataaaatgcaaccatacagtgacatagtgaaataaaagttataacgctaaaaacaaaaaaaccagcccgcccggggagtcttactgcgtgtcagagag

SEQ ID NO: 4717 - DNA, 250 bp, synthetic construct
  source 1..250: mol_type = other DNA
tgaagctcgcattacagtgcttagcttagcttgtggccaccagtcacatttcccgaaaagtgccacctgctagatgtcgctgcaagcaaagcgtgacatacactatattcgcgaaaatttaacttacaaaaaacctgcaaccattcactgacataaaatgcaaccatacagtgacatagtgaaataaaagttataacgctaaaaacaaaaaaaccagcccgcagagcctatcttactgcgtgtcagagag

SEQ ID NO: 4718 - DNA, 250 bp, synthetic construct
  source 1..250: mol_type = other DNA
tgaagctcgcattacagtgcttagcttagcttgtggccaccagtcacatttcccgaaaagtgccacctgctagatgtcgctgcaagcaaagcgtgacatacactggatattcgcgaaaattacttacaaaaaacctgcaaccattcactgacataaaatgcaaccatacagtgacatagtgaaataaaagttataacgctaaaaacaaaaaaaccagcccgccaggcagcacttactgcgtgtcagagag

SEQ ID NO: 4719 - DNA, 250 bp, synthetic construct
  source 1..250: mol_type = other DNA
tgaagctcgcattacagtgcttagcttagcttgtggccaccagtcacatttcccgaaaagtgccacctgctagatgtcgctgcaagcaaagcgtgacatacactggatatattcgcgaaaattttacaaaaaacctgcaaccattcactgacataaaatgcaaccatacagtgacatagtgaaataaaagttataacgctaaaaacaaaaaaaccagcccgacgctgaaagcttactgcgtgtcagagag

SEQ ID NO: 4720 - DNA, 250 bp, synthetic construct
  source 1..250: mol_type = other DNA
tgaagctcgcattacagtgcttagcttagcttgtggccaccagtcacatttcccgaaaagtgccacctgctagatgtcgctgcaagcaaagcgtgacatacactggatagatattcgcgaaaattacaaaaaacctgcaaccattcactgacataaaatgcaaccatacagtgacatagtgaaataaaagttataacgctaaaaacaaaaaaaccagcccgtgacattgtccttactgcgtgtcagagag

SEQ ID NO: 4721 - DNA, 250 bp, synthetic construct
  source 1..250: mol_type = other DNA
tgaagctcgcattacagtgcttagcttagcttgtggccaccagtcacatttcccgaaaagtgccacctgctagatgtcgctgcaagcaaagcgtgacatacactggataggcatattcgcgaaaattaaaaaacctgcaaccattcactgacataaaatgcaaccatacagtgacatagtgaaataaaagttataacgctaaaaacaaaaaaaccagcccgacactctgagcttactgcgtgtcagagag

SEQ ID NO: 4722 - DNA, 250 bp, synthetic construct
  source 1..250: mol_type = other DNA
tgaagctcgcattacagtgcttagcttagcttgtggccaccagtcacatttcccgaaaagtgccacctgctagatgtcgctgcaagcaaagcgtgacatacactggataggcatatattcgcgaaaattaaaacctgcaaccattcactgacataaaatgcaaccatacagtgacatagtgaaataaaagttataacgctaaaaacaaaaaaaccagcccgggttggacaccttactgcgtgtcagagag

SEQ ID NO: 4723 - DNA, 250 bp, synthetic construct
  source 1..250: mol_type = other DNA
tgaagctcgcattacagtgcttagcttagcttgtggccaccagtcacatttcccgaaaagtgccacctgctagatgtcgctgcaagcaaagcgtgacatacactggataggcatatatattcgcgaaaattaacctgcaaccattcactgacataaaatgcaaccatacagtgacatagtgaaataaaagttataacgctaaaaacaaaaaaaccagcccgattgcgacgtcttactgcgtgtcagagag

SEQ ID NO: 4724 - DNA, 250 bp, synthetic construct
  source 1..250: mol_type = other DNA
tgaagctcgcattacagtgcttagcttagcttgtggccaccagtcacatttcccgaaaagtgccacctgctagatgtcgctgcaagcaaagcgtgacatacactggataggcatatcaatattcgcgaaaattcctgcaaccattcactgacataaaatgcaaccatacagtgacatagtgaaataaaagttataacgctaaaaacaaaaaaaccagcccgtgggggcggtcttactgcgtgtcagagag

SEQ ID NO: 4725 - DNA, 250 bp, synthetic construct
  source 1..250: mol_type = other DNA
tgaagctcgcattacagtgcttagcttagcttgtggccaccagtcacatttcccgaaaagtgccacctgctagatgtcgctgcaagcaaagcgtgacatacactggataggcatatcaatatattcgcgaaaatttgcaaccattcactgacataaaatgcaaccatacagtgacatagtgaaataaaagttataacgctaaaaacaaaaaaaccagcccgcatgagcaggcttactgcgtgtcagagag

SEQ ID NO: 4726 - DNA, 250 bp, synthetic construct
  source 1..250: mol_type = other DNA
tgaagctcgcattacagtgcttagcttagcttgtggccaccagtcacatttcccgaaaagtgccacctgctagatgtcgctgcaagcaaagcgtgacataaattttcgcgaatattcaataacttacaaaaaacctgcaaccattcactgacataaaatgcaaccatacagtgacatagtgaaataaaagttataacgctaaaaacaaaaaaaccagcccgggaccggaatcttactgcgtgtcagagag

SEQ ID NO: 4727 - DNA, 250 bp, synthetic construct
  source 1..250: mol_type = other DNA
tgaagctcgcattacagtgcttagcttagcttgtggccaccagtcacatttcccgaaaagtgccacctgctagatgtcgctgcaagcaaagcgtgacatacaaattttcgcgaatataataacttacaaaaaacctgcaaccattcactgacataaaatgcaaccatacagtgacatagtgaaataaaagttataacgctaaaaacaaaaaaaccagcccgctaactgtaacttactgcgtgtcagagag

SEQ ID NO: 4728 - DNA, 250 bp, synthetic construct
  source 1..250: mol_type = other DNA
tgaagctcgcattacagtgcttagcttagcttgtggccaccagtcacatttcccgaaaagtgccacctgctagatgtcgctgcaagcaaagcgtgacatacactaattttcgcgaatattaacttacaaaaaacctgcaaccattcactgacataaaatgcaaccatacagtgacatagtgaaataaaagttataacgctaaaaacaaaaaaaccagcccgtcacgtctgccttactgcgtgtcagagag

SEQ ID NO: 4729 - DNA, 250 bp, synthetic construct
  source 1..250: mol_type = other DNA
tgaagctcgcattacagtgcttagcttagcttgtggccaccagtcacatttcccgaaaagtgccacctgctagatgtcgctgcaagcaaagcgtgacatacactggaattttcgcgaatatacttacaaaaaacctgcaaccattcactgacataaaatgcaaccatacagtgacatagtgaaataaaagttataacgctaaaaacaaaaaaaccagcccgaatcaacatccttactgcgtgtcagagag

SEQ ID NO: 4730 - DNA, 250 bp, synthetic construct
  source 1..250: mol_type = other DNA
tgaagctcgcattacagtgcttagcttagcttgtggccaccagtcacatttcccgaaaagtgccacctgctagatgtcgctgcaagcaaagcgtgacatacactggataattttcgcgaatatttacaaaaaacctgcaaccattcactgacataaaatgcaaccatacagtgacatagtgaaataaaagttataacgctaaaaacaaaaaaaccagcccgctgtggatgacttactgcgtgtcagagag

SEQ ID NO: 4731 - DNA, 250 bp, synthetic construct
  source 1..250: mol_type = other DNA
tgaagctcgcattacagtgcttagcttagcttgtggccaccagtcacatttcccgaaaagtgccacctgctagatgtcgctgcaagcaaagcgtgacatacactggatagaattttcgcgaatatacaaaaaacctgcaaccattcactgacataaaatgcaaccatacagtgacatagtgaaataaaagttataacgctaaaaacaaaaaaaccagcccgttgtggggcacttactgcgtgtcagagag

SEQ ID NO: 4732 - DNA, 250 bp, synthetic construct
  source 1..250: mol_type = other DNA
tgaagctcgcattacagtgcttagcttagcttgtggccaccagtcacatttcccgaaaagtgccacctgctagatgtcgctgcaagcaaagcgtgacatacactggataggcaattttcgcgaatataaaaaacctgcaaccattcactgacataaaatgcaaccatacagtgacatagtgaaataaaagttataacgctaaaaacaaaaaaaccagcccgccagcacggtcttactgcgtgtcagagag

SEQ ID NO: 4733 - DNA, 250 bp, synthetic construct
  source 1..250: mol_type = other DNA
tgaagctcgcattacagtgcttagcttagcttgtggccaccagtcacatttcccgaaaagtgccacctgctagatgtcgctgcaagcaaagcgtgacatacactggataggcataattttcgcgaatataaaacctgcaaccattcactgacataaaatgcaaccatacagtgacatagtgaaataaaagttataacgctaaaaacaaaaaaaccagcccgtctctactgtcttactgcgtgtcagagag

SEQ ID NO: 4734 - DNA, 250 bp, synthetic construct
  source 1..250: mol_type = other DNA
tgaagctcgcattacagtgcttagcttagcttgtggccaccagtcacatttcccgaaaagtgccacctgctagatgtcgctgcaagcaaagcgtgacatacactggataggcatataattttcgcgaatataacctgcaaccattcactgacataaaatgcaaccatacagtgacatagtgaaataaaagttataacgctaaaaacaaaaaaaccagcccggagaatgcaccttactgcgtgtcagagag

SEQ ID NO: 4735 - DNA, 250 bp, synthetic construct
  source 1..250: mol_type = other DNA
tgaagctcgcattacagtgcttagcttagcttgtggccaccagtcacatttcccgaaaagtgccacctgctagatgtcgctgcaagcaaagcgtgacatacactggataggcatatcaaattttcgcgaatatcctgcaaccattcactgacataaaatgcaaccatacagtgacatagtgaaataaaagttataacgctaaaaacaaaaaaaccagcccgctgttgtcgacttactgcgtgtcagagag

SEQ ID NO: 4736 - DNA, 250 bp, synthetic construct
  source 1..250: mol_type = other DNA
tgaagctcgcattacagtgcttagcttagcttgtggccaccagtcacatttcccgaaaagtgccacctgctagatgtcgctgcaagcaaagcgtgacatacactggataggcatatcaataattttcgcgaatattgcaaccattcactgacataaaatgcaaccatacagtgacatagtgaaataaaagttataacgctaaaaacaaaaaaaccagcccgacgcaaacgacttactgcgtgtcagagag

SEQ ID NO: 4737 - DNA, 250 bp, synthetic construct
  source 1..250: mol_type = other DNA
tgaagctcgcattacagtgcttagcttagcttgtggccaccagtcacatttcccgaaaagtgccacctgctagatgtcgctgcaagcaaagcgtgacataaattttcgcgaatattcaataattttcgcgaatattgcaaccattcactgacataaaatgcaaccatacagtgacatagtgaaataaaagttataacgctaaaaacaaaaaaaccagcccgaggtcgcacccttactgcgtgtcagagag

SEQ ID NO: 4738 - DNA, 250 bp, synthetic construct
  source 1..250: mol_type = other DNA
tgaagctcgcattacagtgcttagcttagcttgtggccaccagtcacatttcccgaaaagtgccacctgctagatgtcgctgcaagcaaagcgtgacatacaattttcgcgaatatcaaaattttcgcgaatatctgcaaccattcactgacataaaatgcaaccatacagtgacatagtgaaataaaagttataacgctaaaaacaaaaaaaccagcccgcttatcagttcttactgcgtgtcagagag

SEQ ID NO: 4739 - DNA, 250 bp, synthetic construct
  source 1..250: mol_type = other DNA
tgaagctcgcattacagtgcttagcttagcttgtggccaccagtcacatttcccgaaaagtgccacctgctagatgtcgctgcaagcaaagcgtgacatacaaattttcgcgaatataaattttcgcgaatatcctgcaaccattcactgacataaaatgcaaccatacagtgacatagtgaaataaaagttataacgctaaaaacaaaaaaaccagcccgccattgcgttcttactgcgtgtcagagag

SEQ ID NO: 4740 - DNA, 250 bp, synthetic construct
  source 1..250: mol_type = other DNA
tgaagctcgcattacagtgcttagcttagcttgtggccaccagtcacatttcccgaaaagtgccacctgctagatgtcgctgcaagcaaagcgtgacataaattttcgcgaatattcaataattttcgcgaatattgcaaccattcactgacataaaatgcaaccatacagtgacatagtgaaataaaagttataacgctaaaaacaaaaaaaccagcccgcctcggattgcttactgcgtgtcagagag

SEQ ID NO: 4741 - DNA, 250 bp, synthetic construct
  source 1..250: mol_type = other DNA
tgaagctcgcattacagtgcttagcttagcttgtggccaccagtcacatttcccgaaaagtgccacctgctagatgtcgctgcaagcaaagcgtgacatacaattttcgcgaatatcaaaattttcgcgaatatctgcaaccattcactgacataaaatgcaaccatacagtgacatagtgaaataaaagttataacgctaaaaacaaaaaaaccagcccgacgcgagcggcttactgcgtgtcagagag

SEQ ID NO: 4742 - DNA, 250 bp, synthetic construct
  source 1..250: mol_type = other DNA
tgaagctcgcattacagtgcttagcttagcttgtggccaccagtcacatttcccgaaaagtgccacctgctagatgtcgctgcaagcaaagcgtgacatacaaattttcgcgaatataaattttcgcgaatatcctgcaaccattcactgacataaaatgcaaccatacagtgacatagtgaaataaaagttataacgctaaaaacaaaaaaaccagcccgttacgctgatcttactgcgtgtcagagag

SEQ ID NO: 4743 - DNA, 250 bp, synthetic construct
  source 1..250: mol_type = other DNA
tgaagctcgcattacagtgcttagcttagcttgtggccaccagtcacatttcccgaaaagtgccacctgctagatgtcgctgcaagcaaagcgtgacatacactggataggcatatcaataacttacaaaaaacctgcaaccattcactgacataaaatgcaaccatacagtgacatagtgaaatcatggtctaaacttcagtaagtttacgacattttcaatgggccgtccttactgcgtgtcagagag

SEQ ID NO: 4744 - DNA, 250 bp, synthetic construct
  source 1..250: mol_type = other DNA
tgaagctcgcattacagtgcttagcttagcttgtggccaccagtcacatttcccgaaaagtgccacctgctagatgtcgctgcaagcaaagcgtgacatacactggataggcatatcaataacttacaaaaaacctgcaaccattcactgacataaaatgcaaccatacagtgacatagtgaaatcatgtgagcccaggcagtaagtttacgacattttcaattaaatgtacttactgcgtgtcagagag

SEQ ID NO: 4745 - DNA, 250 bp, synthetic construct
  source 1..250: mol_type = other DNA
tgaagctcgcattacagtgcttagcttagcttgtggccaccagtcacatttcccgaaaagtgccacctgctagatgtcgctgcaagcaaagcgtgacatacactggataggcatatcaataacttacaaaaaacctgcaaccattcactgacataaaatgcaaccatacagtgacatagtgaaatcatggtctaaacttcagtcctgggcatcaattttcactacccgaagcttactgcgtgtcagagag

SEQ ID NO: 4746 - DNA, 250 bp, synthetic construct
  source 1..250: mol_type = other DNA
tgaagctcgcattacagtgcttagcttagcttgtggccaccagtcacatttcccgaaaagtgccacctgctagatgtcgctgcaagcaaagcgtgacatacactggataggcatatcaataacttacaaaaaacctgcaaccattcactgacataaaatgcaaccatacagtgacatagtgaaatcatgtgagcccaggcagtcctgggcatcaattttcatgaccaccagcttactgcgtgtcagagag

SEQ ID NO: 4747 - DNA, 250 bp, synthetic construct
  source 1..250: mol_type = other DNA
tgaagctcgcattacagtgcttagcttagcttgtggccaccagtcacatttcccgaaaagtgccacctgctagatgtcgctgcaagcaaagcgtgacatacactggataggcatatcaataacttacaaaaaacctgcaaccattcactgacataaaatgcaaccatacagtgacatagtgaaatcatgcagatttgaacagtaagtttacgacattttcaaactataactcttactgcgtgtcagagag

SEQ ID NO: 4748 - DNA, 250 bp, synthetic construct
  source 1..250: mol_type = other DNA
tgaagctcgcattacagtgcttagcttagcttgtggccaccagtcacatttcccgaaaagtgccacctgctagatgtcgctgcaagcaaagcgtgacatacactggataggcatatcaataacttacaaaaaacctgcaaccattcactgacataaaatgcaaccatacagtgacatagtgaaatcatggtctaaacttcagtttcaaatgctgattttcagattagcacacttactgcgtgtcagagag

SEQ ID NO: 4749 - DNA, 250 bp, synthetic construct
  source 1..250: mol_type = other DNA
tgaagctcgcattacagtgcttagcttagcttgtggccaccagtcacatttcccgaaaagtgccacctgctagatgtcgctgcaagcaaagcgtgacatacactggataggcatatcaataacttacaaaaaacctgcaaccattcactgacataaaatgcaaccatacagtgacatagtgaaatcatgcagatttgaacagtttcaaatgctgattttcaataagtgtgacttactgcgtgtcagagag

SEQ ID NO: 4750 - DNA, 250 bp, synthetic construct
  source 1..250: mol_type = other DNA
tgaagctcgcattacagtgcttagcttagcttgtggccaccagtcacatttcccgaaaagtgccacctgctagatgtcgctgcaagcaaagcgtgacatacactggataggcatatcaataacttacaaaaaacctgcaaccattcactgacataaaatgcaaccatacagtgacatagtgaaagacttaaacaaaatatatcttgcccgccttacaaatagaagtacctgcttactgcgtgtcagagag

SEQ ID NO: 4751 - DNA, 250 bp, synthetic construct
  source 1..250: mol_type = other DNA
tgaagctcgcattacagtgcttagcttagcttgtggccaccagtcacatttcccgaaaagtgccacctgctagatgtcgctgcaagcaaagcgtgacatacactggataggcatatcaataacttacaaaaaacctgcaaccattcactgacataaaatgcaaccatacagtgacatagtgaaaacatgaattcaaagttatgtaatatagtactatgtacgggatcgcgtcttactgcgtgtcagagag

SEQ ID NO: 4752 - DNA, 250 bp, synthetic construct
  source 1..250: mol_type = other DNA
tgaagctcgcattacagtgcttagcttagcttgtggccaccagtcacatttcccgaaaagtgccacctgctagatgtcgctgcaagcaaagcgtgacatacactggataggcatatcaataacttacaaaaaacctgcaaccattcactgacataaaatgcaaccatacagtgacatagtgaaataacacccgtattacttcataatcgtttgtaattcaatttttatctacttactgcgtgtcagagag

SEQ ID NO: 4753 - DNA, 250 bp, synthetic construct
  source 1..250: mol_type = other DNA
tgaagctcgcattacagtgcttagcttagcttgtggccaccagtcacatttcccgaaaagtgccacctgctagatgtcgctgcaagcaaagcgtgacatacactggataggcatatcaataacttacaaaaaacctgcaaccattcactgacataaaatgcaaccatacagtgacatagtgaaaatgtacactgatgagttattacacctcaagttcaatgttgatacaagcttactgcgtgtcagagag

SEQ ID NO: 4754 - DNA, 250 bp, synthetic construct
  source 1..250: mol_type = other DNA
tgaagctcgcattacagtgcttagcttagcttgtggccaccagtcacatttcccgaaaagtgccacctgctagatgtcgctgcaagcaaagcgtgacatacactggataggcatatcaataacttacaaaaaacctgcaaccattcactgacataaaatgcaaccatacagtgacatagtgaaaagcttgatctacattggattgccattctctcacagtaaaggaacggacttactgcgtgtcagagag

SEQ ID NO: 4755 - DNA, 250 bp, synthetic construct
  source 1..250: mol_type = other DNA
tgaagctcgcattacagtgcttagcttagcttgtggccaccagtcacatttcccgaaaagtgccacctgctagatgtcgctgcaagcaaagcgtgacatacactggataggcatatcaataacttacaaaaaacctgcaaccattcactgacataaaatgcaaccatacagtgacatagtgaaattatgcaggacgacgtacgcgttccatataaacctgtgatctactgccttactgcgtgtcagagag

SEQ ID NO: 4756 - DNA, 250 bp, synthetic construct
  source 1..250: mol_type = other DNA
tgaagctcgcattacagtgcttagcttagcttgtggccaccagtcacatttcccgaaaagtgccacctgctagatgtcgctgcaagcaaagcgtgacatacactggataggcatatcaataacttacaaaaaacctgcaaccattcactgacataaaatgcaaccatacagtgacatagtgaaatctttgctcacgcatctagtcggtccacgtttggttcttcgaggttacttactgcgtgtcagagag

SEQ ID NO: 4757 - DNA, 250 bp, synthetic construct
  source 1..250: mol_type = other DNA
tgaagctcgcattacagtgcttagcttagcttgtggccaccagtcacatttcccgaaaagtgccacctgctagatgtcgctgcaagcaaagcgtgacatacactggataggcatatcaataacttacaaaaaacctgcaaccattcactgacataaaatgcaaccatacagtgacatagtgaaagtacgatccagtgatctccaagacgctgcaagagtcctatgcatacacttactgcgtgtcagagag

SEQ ID NO: 4758 - DNA, 250 bp, synthetic construct
  source 1..250: mol_type = other DNA
tgaagctcgcattacagtgcttagcttagcttgtggccaccagtcacatttcccgaaaagtgccacctgctagatgtcgctgcaagcaaagcgtgacatacactggataggcatatcaataacttacaaaaaacctgcaaccattcactgacataaaatgcaaccatacagtgacatagtgaaacagaccacatagctgccatgtcctgatcggacggacctcaagtcttacttactgcgtgtcagagag

SEQ ID NO: 4759 - DNA, 250 bp, synthetic construct
  source 1..250: mol_type = other DNA
tgaagctcgcattacagtgcttagcttagcttgtggccaccagtcacatttcccgaaaagtgccacctgctagatgtcgctgcaagcaaagcgtgacatacactggataggcatatcaataacttacaaaaaacctgcaaccattcactgacataaaatgcaaccatacagtgacatagtgaaaccgacccggaagagggcgcctagaattgggagtggtccaaggatcttcttactgcgtgtcagagag

SEQ ID NO: 4760 - DNA, 250 bp, synthetic construct
  source 1..250: mol_type = other DNA
tgaagctcgcattacagtgcttagcttagcttgtggccaccagtcacatttcccgaaaagtgccacctgctagatgtcgctgcaagcaaagcgtgacatacactggataggcatatcaataacttacaaaaaacctgcaaccattcactgacataaaatgcaaccatacagtgacatagtgaaagttggcgcccggccctcaggccctgcagtgagttccattaggctttgcttactgcgtgtcagagag

SEQ ID NO: 4761 - DNA, 250 bp, synthetic construct
  source 1..250: mol_type = other DNA
tgaagctcgcattacagtgcttagcttagcttgtggccaccagtcacatttcccgaaaagtgccacctgctagatgtcgctgcaagcaaagcgtgacatacactggataggcatatcaataacttacaaaaaacctgcaaccattcactgacataaaatgcaaccatacagtgacatagtgaaaggcgctctgtaccccgctcggtcctcccgcgcatcgcccgggtttcccttactgcgtgtcagagag

SEQ ID NO: 4762 - DNA, 250 bp, synthetic construct
  source 1..250: mol_type = other DNA
tgaagctcgcattacagtgcttagcttagcttgtggccaccagtcacatttcccgaaaagtgccacctgctagatgtcgctgcaagcaaagcgtgacatacactggataggcatatcaataacttacaaaaaacctgcaaccattcactgacataaaatgcaaccatacagtgacatagtgaaacgcgagaggccggcagccgtctggcgtcgggtggcggcaaatggtctcttactgcgtgtcagagag

SEQ ID NO: 4763 - DNA, 250 bp, synthetic construct
  source 1..250: mol_type = other DNA
tgaagctcgcattacagtgcttagcttagcttgtggccaccagtcacatttcccgaaaagtgccacctgctagatgtcgctgcaagcaaagcgtgacatacactggataggcatatcaataacttacaaaaaacctgcaaccattcactgacataaaatgcaaccatacagtgacatagtgaaattgtgagcggataacaagatcatagtcagaccaacatccgcatgatccttactgcgtgtcagagag

SEQ ID NO: 4764 - DNA, 250 bp, synthetic construct
  source 1..250: mol_type = other DNA
tgaagctcgcattacagtgcttagcttagcttgtggccaccagtcacatttcccgaaaagtgccacctgctagatgtcgctgcaagcaaagcgtgacatacactggataggcatatcaataacttacaaaaaacctgcaaccattcactgacataaaatgcaaccatacagtgacatagtgaaagatcatagtcttgtgagcggataacaaagaccaacatgtagcttaatcttactgcgtgtcagagag

SEQ ID NO: 4765 - DNA, 250 bp, synthetic construct
  source 1..250: mol_type = other DNA
tgaagctcgcattacagtgcttagcttagcttgtggccaccagtcacatttcccgaaaagtgccacctgctagatgtcgctgcaagcaaagcgtgacatacactggataggcatatcaataacttacaaaaaacctgcaaccattcactgacataaaatgcaaccatacagtgacatagtgaaagatcatagtcagaccaacatttgtgagcggataacaactttttccgtcttactgcgtgtcagagag

SEQ ID NO: 4766 - DNA, 250 bp, synthetic construct
  source 1..250: mol_type = other DNA
tgaagctcgcattacagtgcttagcttagcttgtggccaccagtcacatttcccgaaaagtgccacctgctagatgtcgctgcaagcaaagcgtgacatacactggataggcatatcaataacttacaaaaaacctgcaaccattcactgacataaaatgcaaccatacagtgacatagtgaaagatcaaattgtgagcggataacaatttagtcagaccattgtaacaggcttactgcgtgtcagagag

SEQ ID NO: 4767 - DNA, 250 bp, synthetic construct
  source 1..250: mol_type = other DNA
tgaagctcgcattacagtgcttagcttagcttgtggccaccagtcacatttcccgaaaagtgccacctgctagatgtcgctgcaagcaaagcgtgacatacactggataggcatatcaataacttacaaaaaacctgcaaccattcactgacataaaatgcaaccatacagtgacatagtgaaagatcaaaatgtgagcgagtaacaacctagtcagaccaaaatcaagtgcttactgcgtgtcagagag

SEQ ID NO: 4768 - DNA, 250 bp, synthetic construct
  source 1..250: mol_type = other DNA
tgaagctcgcattacagtgcttagcttagcttgtggccaccagtcacatttcccgaaaagtgccacctgctagatgtcgctgcaagcaaagcgtgacatacactggataggcatatcaataacttacaaaaaacctgcaaccattcactgacataaaatgcaaccatacagtgacatagtgaaagatcaggcagtgagcgcaacgcaatttagtcagaccaggcgtcatagcttactgcgtgtcagagag

SEQ ID NO: 4769 - DNA, 250 bp, synthetic construct
  source 1..250: mol_type = other DNA
tgaagctcgcattacagtgcttagcttagcttgtggccaccagtcacatttcccgaaaagtgccacctgctagatgtcgctgcaagcaaagcgtgacatacactggataggcatatcaataacttacaaaaaacctgcaaccattcactgacataaaatgcaaccatacagtgacatagtgaaagtttatggctagctcagtcctaggtacaatgctagcccactgttccccttactgcgtgtcagagag

SEQ ID NO: 4770 - DNA, 250 bp, synthetic construct
  source 1..250: mol_type = other DNA
tgaagctcgcattacagtgcttagcttagcttgtggccaccagtcacatttcccgaaaagtgccacctgctagatgtcgctgcaagcaaagcgtgacatacactggataggcatatcaataacttacaaaaaacctgcaaccattcactgacataaaatgcaaccatacagtgacatagtgaaagttgacggctagctcagtcctaggtatagtgctagccagcctgcaaacttactgcgtgtcagagag

SEQ ID NO: 4771 - DNA, 250 bp, synthetic construct
  source 1..250: mol_type = other DNA
tgaagctcgcattacagtgcttagcttagcttgtggccaccagtcacatttcccgaaaagtgccacctgctagatgtcgctgcaagcaaagcgtgacatacactggataggcatatcaataacttacaaaaaacctgcaaccattcactgacataaaatgcaaccatacagtgacatagtgaaagttgacagctagctcagtcctaggtataatgctagcctccgtcatcgcttactgcgtgtcagagag

SEQ ID NO: 4772 - DNA, 250 bp, synthetic construct
  source 1..250: mol_type = other DNA
tgaagctcgcattacagtgcttagcttagcttgtggccaccagtcacatttcccgaaaagtgccacctgctagatgtcgctgcaagcaaagcgtgacatacactggataggcatatcaataacttacaaaaaacctgcaaccattcactgacataaaatgcaaccatacagtgacatagtgaaaggctagcattgtacctaggactgagctagccataaacgtggttgcaccttactgcgtgtcagagag

SEQ ID NO: 4773 - DNA, 250 bp, synthetic construct
  source 1..250: mol_type = other DNA
tgaagctcgcattacagtgcttagcttagcttgtggccaccagtcacatttcccgaaaagtgccacctgctagatgtcgctgcaagcaaagcgtgacatacactggataggcatatcaataacttacaaaaaacctgcaaccattcactgacataaaatgcaaccatacagtgacatagtgaaaggctagcactatacctaggactgagctagccgtcaacggacgaggggcttactgcgtgtcagagag

SEQ ID NO: 4774 - DNA, 250 bp, synthetic construct
  source 1..250: mol_type = other DNA
tgaagctcgcattacagtgcttagcttagcttgtggccaccagtcacatttcccgaaaagtgccacctgctagatgtcgctgcaagcaaagcgtgacatacactggataggcatatcaataacttacaaaaaacctgcaaccattcactgacataaaatgcaaccatacagtgacatagtgaaaggctagcattatacctaggactgagctagctgtcaactgttagtcttcttactgcgtgtcagagag

SEQ ID NO: 4775 - DNA, 250 bp, synthetic construct
  source 1..250: mol_type = other DNA
tgaagctcgcattacagtgcttagcttagcttgtggccaccagtcacatttcccgaaaagtgccacctgctagatgtcgctgcaagcaaagcgtgacatacactggataggcatatcaataacttacaaaaaacctgcaaccattcactgacataaaatgcaaccatacagtgacatagtgaaagataacttcgtatagcatacattatacgaagttattcggtgtagcgacttactgcgtgtcagagag

SEQ ID NO: 4776 - DNA, 250 bp, synthetic construct
  source 1..250: mol_type = other DNA
tgaagctcgcattacagtgcttagcttagcttgtggccaccagtcacatttcccgaaaagtgccacctgctagatgtcgctgcaagcaaagcgtgacatacactggataggcatatcaataacttacaaaaaacctgcaaccattcactgacataaaatgcaaccatacagtgacatagtgaaagataacttcgtatagtataccttatacgaagttattcgttaacgcaccttactgcgtgtcagagag

SEQ ID NO: 4777 - DNA, 250 bp, synthetic construct
  source 1..250: mol_type = other DNA
tgaagctcgcattacagtgcttagcttagcttgtggccaccagtcacatttcccgaaaagtgccacctgctagatgtcgctgcaagcaaagcgtgacatacactggataggcatatcaataacttacaaaaaacctgcaaccattcactgacataaaatgcaaccatacagtgacatagtgaaagataacttcgtataggatactttatacgaagttattctcgtcaaccacttactgcgtgtcagagag

SEQ ID NO: 4778 - DNA, 250 bp, synthetic construct
  source 1..250: mol_type = other DNA
tgaagctcgcattacagtgcttagcttagcttgtggccaccagtcacatttcccgaaaagtgccacctgctagatgtcgctgcaagcaaagcgtgacatacactggataggcatatcaataacttacaaaaaacctgcaaccattcactgacataaaatgcaaccatacagtgacatagtgaaagataacttcgtatagtatacattatacgaagttattcaaggatagctcttactgcgtgtcagagag

SEQ ID NO: 4779 - DNA, 250 bp, synthetic construct
  source 1..250: mol_type = other DNA
tgaagctcgcattacagtgcttagcttagcttgtggccaccagtcacatttcccgaaaagtgccacctgctagatgtcgctgcaagcaaagcgtgacatacactggataggcatatcaataacttacaaaaaacctgcaaccattcactgacataaaatgcaaccatacagtgacatagtgaaagataacttggtatagcatacattatacgaacggtatcgaactgagtgcttactgcgtgtcagagag

SEQ ID NO: 4780 - DNA, 250 bp, synthetic construct
  source 1..250: mol_type = other DNA
tgaagctcgcattacagtgcttagcttagcttgtggccaccagtcacatttcccgaaaagtgccacctgctagatgtcgctgcaagcaaagcgtgacatacactggataggcatatcaataacttacaaaaaacctgcaaccattcactgacataaaatgcaaccatacagtgacatagtgaaagtaccgttcgtatacgatacattatacgaagttattcatatataagacttactgcgtgtcagagag

SEQ ID NO: 4781 - DNA, 250 bp, synthetic construct
  source 1..250: mol_type = other DNA
tgaagctcgcattacagtgcttagcttagcttgtggccaccagtcacatttcccgaaaagtgccacctgctagatgtcgctgcaagcaaagcgtgacatacactggataggcatatcaataacttacaaaaaacctgcaaccattcactgacataaaatgcaaccatacagtgacatagtgaaagataacttcgtataatgtatgctatacgaagttattcaggacccatccttactgcgtgtcagagag

SEQ ID NO: 4782 - DNA, 250 bp, synthetic construct
  source 1..250: mol_type = other DNA
tgaagctcgcattacagtgcttagcttagcttgtggccaccagtcacatttcccgaaaagtgccacctgctagatgtcgctgcaagcaaagcgtgacatacactggataggcatatcaataacttacaaaaaacctgcaaccattcactgacataaaatgcaaccatacagtgacatagtgaaagataacttcgtataaggtatactatacgaagttattctcggccagtccttactgcgtgtcagagag

SEQ ID NO: 4783 - DNA, 250 bp, synthetic construct
  source 1..250: mol_type = other DNA
tgaagctcgcattacagtgcttagcttagcttgtggccaccagtcacatttcccgaaaagtgccacctgctagatgtcgctgcaagcaaagcgtgacatacactggataggcatatcaataacttacaaaaaacctgcaaccattcactgacataaaatgcaaccatacagtgacatagtgaaagataacttcgtataaagtatcctatacgaagttattcggttctcgaacttactgcgtgtcagagag

SEQ ID NO: 4784 - DNA, 250 bp, synthetic construct
  source 1..250: mol_type = other DNA
tgaagctcgcattacagtgcttagcttagcttgtggccaccagtcacatttcccgaaaagtgccacctgctagatgtcgctgcaagcaaagcgtgacatacactggataggcatatcaataacttacaaaaaacctgcaaccattcactgacataaaatgcaaccatacagtgacatagtgaaagataacttcgtataatgtatactatacgaagttattcaggacaaacgcttactgcgtgtcagagag

SEQ ID NO: 4785 - DNA, 250 bp, synthetic construct
  source 1..250: mol_type = other DNA
tgaagctcgcattacagtgcttagcttagcttgtggccaccagtcacatttcccgaaaagtgccacctgctagatgtcgctgcaagcaaagcgtgacatacactggataggcatatcaataacttacaaaaaacctgcaaccattcactgacataaaatgcaaccatacagtgacatagtgaaagtaccgttcgtataatgtatgctataccaagttattcaccgccccaacttactgcgtgtcagagag

SEQ ID NO: 4786 - DNA, 250 bp, synthetic construct
  source 1..250: mol_type = other DNA
tgaagctcgcattacagtgcttagcttagcttgtggccaccagtcacatttcccgaaaagtgccacctgctagatgtcgctgcaagcaaagcgtgacatacactggataggcatatcaataacttacaaaaaacctgcaaccattcactgacataaaatgcaaccatacagtgacatagtgaaagataacttcgtataatgtatcgtatacgaacggtatcctcattaggccttactgcgtgtcagagag

SEQ ID NO: 4787 - DNA, 250 bp, synthetic construct
  source 1..250: mol_type = other DNA
tgaagctcgcattacagtgcttagcttagcttgtggccaccagtcacatttcccgaaaagtgccacctgctagatgtcgctgcaagcaaagcgtgacatacactggataggcatatcaataacttacaaaaaacctgcaaccattcactgacataaaatgcaaccatacagtgacatagtgaaagatagtactgcgcgcctgaattcatcgttaaatcgtccggacgtttacttactgcgtgtcagagag

SEQ ID NO: 4788 - DNA, 250 bp, synthetic construct
  source 1..250: mol_type = other DNA
tgaagctcgcattacagtgcttagcttagcttgtggccaccagtcacatttcccgaaaagtgccacctgctagatgtcgctgcaagcaaagcgtgacatacactggataggcatatcaataacttacaaaaaacctgcaaccattcactgacataaaatgcaaccatacagtgacatagtgaaagatcgttttaaggatgacttcagtcgcgccgtacttctaagtcagtacttactgcgtgtcagagag

SEQ ID NO: 4789 - DNA, 250 bp, synthetic construct
  source 1..250: mol_type = other DNA
tgaagctcgcattacagtgcttagcttagcttgtggccaccagtcacatttcccgaaaagtgccacctgctagatgtcgctgcaagcaaagcgtgacatacactggataggcatatcaataacttacaaaaaacctgcaaccattcactgacataaaatgcaaccatacagtgacatagtgaaagatcaggaattgtgagcggataacaatttagtcagacgtgccttccacttactgcgtgtcagagag

SEQ ID NO: 4790 - DNA, 250 bp, synthetic construct
  source 1..250: mol_type = other DNA
tgaagctcgcattacagtgcttagcttagcttgtggccaccagtcacatttcccgaaaagtgccacctgctagatgtcgctgcaagcaaagcgtgacatacactggataggcatatcaataacttacaaaaaacctgcaaccattcactgacataaaatgcaaccatacagtgacatagtgaaagatcatagtcagctgaagcgagacaccgaccaacattatttaagttgcttactgcgtgtcagagag

SEQ ID NO: 4791 - DNA, 250 bp, synthetic construct
  source 1..250: mol_type = other DNA
tgaagctcgcattacagtgcttagcttagcttgtggccaccagtcacatttcccgaaaagtgccacctgctagatgtcgctgcaagcaaagcgtgacatacactggataggcatatcaataacttacaaaaaacctgcaaccattcactgacataaaatgcaaccatacagtgacatagtgaaagatcataaatatataaattaattattaaattagtcaggcccccggggcttactgcgtgtcagagag

SEQ ID NO: 4792 - DNA, 250 bp, synthetic construct
  source 1..250: mol_type = other DNA
tgaagctcgcattacagtgcttagcttagcttgtggccaccagtcacatttcccgaaaagtgccacctgctagatgtcgctgcaagcaaagcgtgacatacactggataggcatatcaataacttacaaaaaacctgcaaccattcactgacataaaatgcaaccatacagtgacatagtgaaagatcatttacttttggttacatatttagtcagaccaagcggccgactcttactgcgtgtcagagag

SEQ ID NO: 4793 - DNA, 250 bp, synthetic construct
  source 1..250: mol_type = other DNA
tgaagctcgcattacagtgcttagcttagcttgtggccaccagtcacatttcccgaaaagtgccacctgctagatgtcgctgcaagcaaagcgtgacatacactggataggcatatcaataacttacaaaaaacctgcaaccattcactgacataaaatgcaaccatacagtgacatagtgaaagatcatagtctgtgattgttatcacatttcagaccaataggggggcccttactgcgtgtcagagag

SEQ ID NO: 4794 - DNA, 250 bp, synthetic construct
  source 1..250: mol_type = other DNA
tgaagctcgcattacagtgcttagcttagcttgtggccaccagtcacatttcccgaaaagtgccacctgctagatgtcgctgcaagcaaagcgtgacatacactggataggcatatcaataacttacaaaaaacctgcaaccattcactgacataaaatgcaaccatacagtgacatagtgaaagatcatagtcagatgaatttttatgcaaagaccaacatattttataacttactgcgtgtcagagag

SEQ ID NO: 4795 - DNA, 250 bp, synthetic construct
  source 1..250: mol_type = other DNA
tgaagctcgcattacagtgcttagcttagcttgtggccaccagtcacatttcccgaaaagtgccacctgctagatgtcgctgcaagcaaagcgtgacatacactggataggcatatcaataacttacaaaaaacctgcaaccattcactgacataaaatgcaaccatacagtgacatagtgaaagatcatagtcaactgtatataaatacagttcagaccatcaatttcttcttactgcgtgtcagagag

SEQ ID NO: 4796 - DNA, 250 bp, synthetic construct
  source 1..250: mol_type = other DNA
tgaagctcgcattacagtgcttagcttagcttgtggccaccagtcacatttcccgaaaagtgccacctgctagatgtcgctgcaagcaaagcgtgacatacactggataggcatatcaataacttacaaaaaacctgcaaccattcactgacataaaatgcaaccatacagtgacatagtgaaagatcatagcgtactagttaactagttcgagtcagaccttcccaagtgcttactgcgtgtcagagag

SEQ ID NO: 4797 - DNA, 250 bp, synthetic construct
  source 1..250: mol_type = other DNA
tgaagctcgcattacagtgcttagcttagcttgtggccaccagtcacatttcccgaaaagtgccacctgctagatgtcgctgcaagcaaagcgtgacatacactggataggcatatcaataacttacaaaaaacctgcaaccattcactgacataaaatgcaaccatacagtgacatagtgaaagatcataattgttatccgctcacaattccagtcagactattcgataccttactgcgtgtcagagag

SEQ ID NO: 4798 - DNA, 250 bp, synthetic construct
  source 1..250: mol_type = other DNA
tgaagctcgcattacagtgcttagcttagcttgtggccaccagtcacatttcccgaaaagtgccacctgctagatgtcgctgcaagcaaagcgtgacatacactggataggcatatcaataacttacaaaaaacctgcaaccattcactgacataaaatgcaaccatacagtgacatagtgaaagatcatggtgtctcgcttcagcagtcagaccaacattctcagctggccttactgcgtgtcagagag

SEQ ID NO: 4799 - DNA, 250 bp, synthetic construct
  source 1..250: mol_type = other DNA
tgaagctcgcattacagtgcttagcttagcttgtggccaccagtcacatttcccgaaaagtgccacctgctagatgtcgctgcaagcaaagcgtgacatacactggataggcatatcaataacttacaaaaaacctgcaaccattcactgacataaaatgcaaccatacagtgacatagtgaaagatcatatttaataattaatttatatatttaagtcagcatctaaattcttactgcgtgtcagagag

SEQ ID NO: 4800 - DNA, 250 bp, synthetic construct
  source 1..250: mol_type = other DNA
tgaagctcgcattacagtgcttagcttagcttgtggccaccagtcacatttcccgaaaagtgccacctgctagatgtcgctgcaagcaaagcgtgacatacactggataggcatatcaataacttacaaaaaacctgcaaccattcactgacataaaatgcaaccatacagtgacatagtgaaagatcaatatgtaaccaaaagtaaaatagtcagaccaacaggaacatgcttactgcgtgtcagagag

SEQ ID NO: 4801 - DNA, 250 bp, synthetic construct
  source 1..250: mol_type = other DNA
tgaagctcgcattacagtgcttagcttagcttgtggccaccagtcacatttcccgaaaagtgccacctgctagatgtcgctgcaagcaaagcgtgacatacactggataggcatatcaataacttacaaaaaacctgcaaccattcactgacataaaatgcaaccatacagtgacatagtgaaagatcatagtcaatgtgataacaatcacagaagaccaagtgcagcctgcttactgcgtgtcagagag

SEQ ID NO: 4802 - DNA, 250 bp, synthetic construct
  source 1..250: mol_type = other DNA
tgaagctcgcattacagtgcttagcttagcttgtggccaccagtcacatttcccgaaaagtgccacctgctagatgtcgctgcaagcaaagcgtgacatacactggataggcatatcaataacttacaaaaaacctgcaaccattcactgacataaaatgcaaccatacagtgacatagtgaaagatcatttgcataaaaattcatctagtcagaccaacaccaaaggggccttactgcgtgtcagagag

SEQ ID NO: 4803 - DNA, 250 bp, synthetic construct
  source 1..250: mol_type = other DNA
tgaagctcgcattacagtgcttagcttagcttgtggccaccagtcacatttcccgaaaagtgccacctgctagatgtcgctgcaagcaaagcgtgacatacactggataggcatatcaataacttacaaaaaacctgcaaccattcactgacataaaatgcaaccatacagtgacatagtgaaagatcatagtcaaactgtatttatatacagttggaccatcgagcgatccttactgcgtgtcagagag

SEQ ID NO: 4804 - DNA, 250 bp, synthetic construct
  source 1..250: mol_type = other DNA
tgaagctcgcattacagtgcttagcttagcttgtggccaccagtcacatttcccgaaaagtgccacctgctagatgtcgctgcaagcaaagcgtgacatacactggataggcatatcaataacttacaaaaaacctgcaaccattcactgacataaaatgcaaccatacagtgacatagtgaaagatcatagtcgaactagttaactagtacgctcagaccgtgacccctccttactgcgtgtcagagag

SEQ ID NO: 4805 - DNA, 250 bp, synthetic construct
  source 1..250: mol_type = other DNA
tgaagctcgcattacagtgcttagcttagcttgtggccaccagtcacatttcccgaaaagtgccacctgctagatgtcgcttgcaccataaggctacatacactggataggcatatcaataacttacaaaaaacctgcaaccattcactgacataaaatgcaaccatacagtgacatagtgaaataaaagttataacgctaaaaacaaaaaaaccagcccgagacctatttcttactgcgtgtcagagag

SEQ ID NO: 4806 - DNA, 250 bp, synthetic construct
  source 1..250: mol_type = other DNA
tgaagctcgcattacagtgcttagcttagcttgtggccaccagtcacatttcccgaaaagtgccacctgctagatgtcgctgcaagcaaagcgtgacatacactggataggcatatcaataacttacaaaaaacccttcaccataagcatgcataaaatgcaaccatacagtgacatagtgaaataaaagttataacgctaaaaacaaaaaaaccagcccgtctttatgcgcttactgcgtgtcagagag

SEQ ID NO: 4807 - DNA, 250 bp, synthetic construct
  source 1..250: mol_type = other DNA
tgaagctcgcattacagtgcttagcttagcttgtggccaccagtcacatttcccgaaaagtgccacctgctagatgtcgctgcaagcaaagcgtgacatacactggataggcatatcaataacttacaaaaaacctgcaaccattcactgacataaaaaggcagcataacccgacatagtgaaataaaagttataacgctaaaaacaaaaaaaccagcccgcagggtcaatcttactgcgtgtcagagag

SEQ ID NO: 4808 - DNA, 250 bp, synthetic construct
  source 1..250: mol_type = other DNA
tgaagctcgcattacagtgcttagcttagcttgtggccaccagtcacatttcccgaaaagtgccacctgctagatgtcgcttgcaccataaggctacatacactggataggcatatcaataacttacaaaaaacccttcaccataagcatgcataaaaaggcagcataacccgacatagtgaaataaaagttataacgctaaaaacaaaaaaaccagcccgggtcctacaccttactgcgtgtcagagag

SEQ ID NO: 4809 - DNA, 250 bp, synthetic construct
  source 1..250: mol_type = other DNA
tgaagctcgcattacagtgcttagcttagcttgtggccaccagtcacatttcccgaaaagtgccacctgctagatgtcgcttgcaccataaggctacatagccaaccacttataaatcagaagcttagttatttctcttcaccataagcatgcataaaaaggcagcataacccgacatatgaaataaaagttataacgctaaaaacaaaaaaaccagcccgggcattgaaacttactgcgtgtcagagag

SEQ ID NO: 4810 - DNA, 250 bp, synthetic construct
  source 1..250: mol_type = other DNA
tgaagctcgcattacagtgcttagcttagcttgtggccaccagtcacatttcccgaaaagtgccacctgctagatgtcgcttgcaccataaggctacatagccaaccacttataaatcagaagcttagttatttctcttcaccataagcatgcataaaaaggcagcataacccgacataacactacatgcgaacattctgcctctcagttacatgtaagttccgtcttgtccttactgcgtgtcagagag

SEQ ID NO: 4811 - DNA, 250 bp, synthetic construct
  source 1..250: mol_type = other DNA
tgaagctcgcattacagtgcttagcttagcttgtggccaccagtcacatttcccgaaaagtgccacctgctagatgtcgctggaagcataacctgacatacactggataggcatatcaataacttacaaaaaacctgcaaccattcactgacataaaatgcaaccatacagtgacatagtgaaataaaagttataacgctaaaaacaaaaaaaccagcccgatggtctacccttactgcgtgtcagagag

SEQ ID NO: 4812 - DNA, 250 bp, synthetic construct
  source 1..250: mol_type = other DNA
tgaagctcgcattacagtgcttagcttagcttgtggccaccagtcacatttcccgaaaagtgccacctgctagatgtcgctgcaagcaaagcgtgacatacactggataggcatatcaataacttacaaaaaacctataaccatatcctgacataaaatgcaaccatacagtgacatagtgaaataaaagttataacgctaaaaacaaaaaaaccagcccgatagttctcccttactgcgtgtcagagag

SEQ ID NO: 4813 - DNA, 250 bp, synthetic construct
  source 1..250: mol_type = other DNA
tgaagctcgcattacagtgcttagcttagcttgtggccaccagtcacatttcccgaaaagtgccacctgctagatgtcgctgcaagcaaagcgtgacatacactggataggcatatcaataacttacaaaaaacctgcaaccattcactgacataaaatataaccgtaagctgacaaagtgaaataaaagttataacgctaaaaacaaaaaaaccagcccgtgcgaaacaccttactgcgtgtcagagag

SEQ ID NO: 4814 - DNA, 250 bp, synthetic construct
  source 1..250: mol_type = other DNA
tgaagctcgcattacagtgcttagcttagcttgtggccaccagtcacatttcccgaaaagtgccacctgctagatgtcgctgcaagcaaagcgtgacatacactggataggcatatcaataacttacaaaaaacctgcaaccattcactgacataaaatgcaaccatacagtgacatagtgaaataaaagttataacgctaaaaacaaaaaaaccagcccgtggagagctgcttactgcgtgtcagagag

SEQ ID NO: 4815 - DNA, 250 bp, synthetic construct
  source 1..250: mol_type = other DNA
tgaagctcgcattacagtgcttagcttagcttgtggccaccagtcacatttcccgaaaagtgccacctgctagatgtcgctggaagcataacctgacataggtcgcttcaaactttcaatagcttagttgaaaaatataaccatatcctgacataaaatataaccgtaagctgacaaagtgaaataaaagttataacgctaaaaacaaaaaaaccagcccgtgctcgggaccttactgcgtgtcagagag

SEQ ID NO: 4816 - DNA, 250 bp, synthetic construct
  source 1..250: mol_type = other DNA
tgaagctcgcattacagtgcttagcttagcttgtggccaccagtcacatttcccgaaaagtgccacctgctagatgtcgctggaagcataacctgacataggtcgcttcaaactttcaatagcttagttgaaaaatataaccatatcctgacataaaatataaccgtaagctgacaaattgaagcaatctctggagccaaaacttttccatgtacttttatatcacgcttccttactgcgtgtcagagag

SEQ ID NO: 4817 - DNA, 250 bp, synthetic construct
  source 1..250: mol_type = other DNA
tgaagctcgcattacagtgcttagcttagcttgtggccaccagtcacatttcccgaaaagtgccacctgctagatgtcgctgcaagcaaagcgtgacatacgctggataggcatatcaataacttacaaaaaacctgcaaccattaactgacataaaatacaaccatacagtgacatagtgggttaaaagttataacgctaaaaacaaaaaaaccagcccgatcggaagagcttactgcgtgtcagagag

SEQ ID NO: 4818 - DNA, 250 bp, synthetic construct
  source 1..250: mol_type = other DNA
tgaagctcgcattacagtgcttagcttagcttgtggccaccagtcacatttcccgaaaagtgccacctgctagatgtcgctgcaagcaaagcgtgacatacactgggtcggcatatcaataacttacaaaaaacctacaaccatacaccgacataaaatacaaccatacaatgacatagtggcctaaaagttataacgctaaaaacaaaaaaaccagcccgcgagcggtcacttactgcgtgtcagagag

SEQ ID NO: 4819 - DNA, 250 bp, synthetic construct
  source 1..250: mol_type = other DNA
tgaagctcgcattacagtgcttagcttagcttgtggccaccagtcacatttcccgaaaagtgccacctgctagatgtcgctgtaaacaaagtatgacaaacgctggatagacacattagttacttatagataacctgcaaccattcactgacataaaatgcaaccatacaatgacataatgaagtaaaagttataacgctaaaaacaaaaaaaccagcccggcctcagttacttactgcgtgtcagagag

SEQ ID NO: 4820 - DNA, 250 bp, synthetic construct
  source 1..250: mol_type = other DNA
tgaagctcgcattacagtgcttagcttagcttgtggccaccagtcacatttcccgaaaagtgccacctgctagatgtcgctgcaagcaaagcgtgacatacactggataggcatatcaataacttacaaaaaacctgcaaccattcactgacataaaatgcaaccatacagtgacatagtgaaataaaagttataacgctaaaaacaaaaaaaccagcccgtatggggagtcttactgcgtgtcagagag

SEQ ID NO: 4821 - DNA, 250 bp, synthetic construct
  source 1..250: mol_type = other DNA
tgaagctcgcattacagtgcttagcttagcttgtggccaccagtcacatttcccgaaaagtgccacctgctagatgtcgctgcaagcaaagcgtgacatacactggataggcatatcaataacttacaaaaaaccaaatgcaaccattcactgacatatgcaaccatacagtgacatagtgaaataaaagttataacgctaaaaacaaaaaaaccagcccggagtgaacgtcttactgcgtgtcagagag

SEQ ID NO: 4822 - DNA, 250 bp, synthetic construct
  source 1..250: mol_type = other DNA
tgaagctcgcattacagtgcttagcttagcttgtggccaccagtcacatttcccgaaaagtgccacctgctagatgtcgctgcaagcaaagcgtgacatacactggataggcatatcaataacttacaaaaaaccatgcaaccattcactgacataaatgcaaccatacagtgacatagtgaaataaaagttataacgctaaaaacaaaaaaaccagcccgattatgcacgcttactgcgtgtcagagag

SEQ ID NO: 4823 - DNA, 250 bp, synthetic construct
  source 1..250: mol_type = other DNA
tgaagctcgcattacagtgcttagcttagcttgtggccaccagtcacatttcccgaaaagtgccacctgctagatgtcgctgcaagcaaagcgtgacatacactggataggcatatcaataacttacaaaaaactgcaaccattcactgacatacaaatgcaaccatacagtgacatagtgaaataaaagttataacgctaaaaacaaaaaaaccagcccgacttggacagcttactgcgtgtcagagag

SEQ ID NO: 4824 - DNA, 250 bp, synthetic construct
  source 1..250: mol_type = other DNA
tgaagctcgcattacagtgcttagcttagcttgtggccaccagtcacatttcccgaaaagtgccacctgctagatgtcgctgcaagcaaagcgtgacatacactggataggcatatcaataacttacaaaaatgcaaccattcactgacataaccaaatgcaaccatacagtgacatagtgaaataaaagttataacgctaaaaacaaaaaaaccagcccgagcttaggtccttactgcgtgtcagagag

SEQ ID NO: 4825 - DNA, 250 bp, synthetic construct
  source 1..250: mol_type = other DNA
tgaagctcgcattacagtgcttagcttagcttgtggccaccagtcacatttcccgaaaagtgccacctgctagatgtcgctgcaagcaaagcgtgacatacactggataggcatatcaataacttacaaatgcaaccattcactgacataaaaccaaatgcaaccatacagtgacatagtgaaataaaagttataacgctaaaaacaaaaaaaccagcccgggaacgcatacttactgcgtgtcagagag

SEQ ID NO: 4826 - DNA, 250 bp, synthetic construct
  source 1..250: mol_type = other DNA
tgaagctcgcattacagtgcttagcttagcttgtggccaccagtcacatttcccgaaaagtgccacctgctagatgtcgctgcaagcaaagcgtgacatacactggataggcatatcaataacttacatgcaaccattcactgacataaaaaaccaaatgcaaccatacagtgacatagtgaaataaaagttataacgctaaaaacaaaaaaaccagcccgcgcagatcaacttactgcgtgtcagagag

SEQ ID NO: 4827 - DNA, 250 bp, synthetic construct
  source 1..250: mol_type = other DNA
tgaagctcgcattacagtgcttagcttagcttgtggccaccagtcacatttcccgaaaagtgccacctgctagatgtcgctgcaagcaaagcgtgacatacactggataggcatatcaataacttatgcaaccattcactgacatacaaaaaaccaaatgcaaccatacagtgacatagtgaaataaaagttataacgctaaaaacaaaaaaaccagcccgaccttgcggacttactgcgtgtcagagag

SEQ ID NO: 4828 - DNA, 250 bp, synthetic construct
  source 1..250: mol_type = other DNA
tgaagctcgcattacagtgcttagcttagcttgtggccaccagtcacatttcccgaaaagtgccacctgctagatgtcgctgcaagcaaagcgtgacatacactggataggcatatcaataacttgcaaccattcactgacatatacaaaaaaccaaatgcaaccatacagtgacatagtgaaataaaagttataacgctaaaaacaaaaaaaccagcccgtagagatattcttactgcgtgtcagagag

SEQ ID NO: 4829 - DNA, 250 bp, synthetic construct
  source 1..250: mol_type = other DNA
tgaagctcgcattacagtgcttagcttagcttgtggccaccagtcacatttcccgaaaagtgccacctgctagatgtcgctgcaagcaaagcgtgacatacactggataggcatatcaataatgcaaccattcactgacatacttacaaaaaaccaaatgcaaccatacagtgacatagtgaaataaaagttataacgctaaaaacaaaaaaaccagcccgacaccgccatcttactgcgtgtcagagag

SEQ ID NO: 4830 - DNA, 250 bp, synthetic construct
  source 1..250: mol_type = other DNA
tgaagctcgcattacagtgcttagcttagcttgtggccaccagtcacatttcccgaaaagtgccacctgctagatgtcgctgcaagcaaagcgtgacatacactggataggcatatcaattgcaaccattcactgacataaacttacaaaaaaccaaatgcaaccatacagtgacatagtgaaataaaagttataacgctaaaaacaaaaaaaccagcccgactgtcaagtcttactgcgtgtcagagag

SEQ ID NO: 4831 - DNA, 250 bp, synthetic construct
  source 1..250: mol_type = other DNA
tgaagctcgcattacagtgcttagcttagcttgtggccaccagtcacatttcccgaaaagtgccacctgctagatgtcgctgcaagcaaagcgtgacatacactggataggcatatcatgcaaccattcactgacataataacttacaaaaaaccaaatgcaaccatacagtgacatagtgaaataaaagttataacgctaaaaacaaaaaaaccagcccggcgcactgggcttactgcgtgtcagagag

SEQ ID NO: 4832 - DNA, 250 bp, synthetic construct
  source 1..250: mol_type = other DNA
tgaagctcgcattacagtgcttagcttagcttgtggccaccagtcacatttcccgaaaagtgccacctgctagatgtcgctgcaagcaaagcgtgacatacactggataggcatattgcaaccattcactgacatacaataacttacaaaaaaccaaatgcaaccatacagtgacatagtgaaataaaagttataacgctaaaaacaaaaaaaccagcccggagtcaaaatcttactgcgtgtcagagag

SEQ ID NO: 4833 - DNA, 250 bp, synthetic construct
  source 1..250: mol_type = other DNA
tgaagctcgcattacagtgcttagcttagcttgtggccaccagtcacatttcccgaaaagtgccacctgctagatgtcgctgcaagcaaagcgtgacatacactggataggcattgcaaccattcactgacataatcaataacttacaaaaaaccaaatgcaaccatacagtgacatagtgaaataaaagttataacgctaaaaacaaaaaaaccagcccggaatttccctcttactgcgtgtcagagag

SEQ ID NO: 4834 - DNA, 250 bp, synthetic construct
  source 1..250: mol_type = other DNA
tgaagctcgcattacagtgcttagcttagcttgtggccaccagtcacatttcccgaaaagtgccacctgctagatgtcgctgcaagcaaagcgtgacatacactggataggctgcaaccattcactgacataatatcaataacttacaaaaaaccaaatgcaaccatacagtgacatagtgaaataaaagttataacgctaaaaacaaaaaaaccagcccgcaatttatgtcttactgcgtgtcagagag

SEQ ID NO: 4835 - DNA, 250 bp, synthetic construct
  source 1..250: mol_type = other DNA
tgaagctcgcattacagtgcttagcttagcttgtggccaccagtcacatttcccgaaaagtgccacctgctagatgtcgctgcaagcaaagcgtgacatacactggatagtgcaaccattcactgacatagcatatcaataacttacaaaaaaccaaatgcaaccatacagtgacatagtgaaataaaagttataacgctaaaaacaaaaaaaccagcccggtttagactacttactgcgtgtcagagag

SEQ ID NO: 4836 - DNA, 250 bp, synthetic construct
  source 1..250: mol_type = other DNA
tgaagctcgcattacagtgcttagcttagcttgtggccaccagtcacatttcccgaaaagtgccacctgctagatgtcgctgcaagcaaagcgtgacatacactggattgcaaccattcactgacataaggcatatcaataacttacaaaaaaccaaatgcaaccatacagtgacatagtgaaataaaagttataacgctaaaaacaaaaaaaccagcccgggaagttaatcttactgcgtgtcagagag

SEQ ID NO: 4837 - DNA, 250 bp, synthetic construct
  source 1..250: mol_type = other DNA
tgaagctcgcattacagtgcttagcttagcttgtggccaccagtcacatttcccgaaaagtgccacctgctagatgtcgctgcaagcaaagcgtgacatacactggtgcaaccattcactgacataataggcatatcaataacttacaaaaaaccaaatgcaaccatacagtgacatagtgaaataaaagttataacgctaaaaacaaaaaaaccagcccgtactatattgcttactgcgtgtcagagag

SEQ ID NO: 4838 - DNA, 250 bp, synthetic construct
  source 1..250: mol_type = other DNA
tgaagctcgcattacagtgcttagcttagcttgtggccaccagtcacatttcccgaaaagtgccacctgctagatgtcgctgcaagcaaagcgtgacatacacttgcaaccattcactgacataggataggcatatcaataacttacaaaaaaccaaatgcaaccatacagtgacatagtgaaataaaagttataacgctaaaaacaaaaaaaccagcccgcaagctcattcttactgcgtgtcagagag

SEQ ID NO: 4839 - DNA, 250 bp, synthetic construct
  source 1..250: mol_type = other DNA
tgaagctcgcattacagtgcttagcttagcttgtggccaccagtcacatttcccgaaaagtgccacctgctagatgtcgctgcaagcaaagcgtgacatacatgcaaccattcactgacatactggataggcatatcaataacttacaaaaaaccaaatgcaaccatacagtgacatagtgaaataaaagttataacgctaaaaacaaaaaaaccagcccggtggactcctcttactgcgtgtcagagag

SEQ ID NO: 4840 - DNA, 250 bp, synthetic construct
  source 1..250: mol_type = other DNA
tgaagctcgcattacagtgcttagcttagcttgtggccaccagtcacatttcccgaaaagtgccacctgctagatgtcgctgcaagcaaagcgtgacatactgcaaccattcactgacataactggataggcatatcaataacttacaaaaaaccaaatgcaaccatacagtgacatagtgaaataaaagttataacgctaaaaacaaaaaaaccagcccgagtattttcacttactgcgtgtcagagag

SEQ ID NO: 4841 - DNA, 250 bp, synthetic construct
  source 1..250: mol_type = other DNA
tgaagctcgcattacagtgcttagcttagcttgtggccaccagtcacatttcccgaaaagtgccacctgctagatgtcgctgcaagcaaagcgtgacatatgcaaccattcactgacatacactggataggcatatcaataacttacaaaaaaccaaatgcaaccatacagtgacatagtgaaataaaagttataacgctaaaaacaaaaaaaccagcccgcctttacattcttactgcgtgtcagagag

SEQ ID NO: 4842 - DNA, 250 bp, synthetic construct
  source 1..250: mol_type = other DNA
tgaagctcgcattacagtgcttagcttagcttgtggccaccagtcacatttcccgaaaagtgccacctgctagatgtcgctgcaagcaaagcgtgacatacactggataggcatatcaataacttacaaaaaacctgcaaccattcactgacatatgcaaccatacagtgacataaaagtgaaataaaagttataacgctaaaaacaaaaaaaccagcccgtaggcgggatcttactgcgtgtcagagag

SEQ ID NO: 4843 - DNA, 250 bp, synthetic construct
  source 1..250: mol_type = other DNA
tgaagctcgcattacagtgcttagcttagcttgtggccaccagtcacatttcccgaaaagtgccacctgctagatgtcgctgcaagcaaagcgtgacatacactggataggcatatcaataacttacaaaaaacctgcaaccattcactgacataaatgcaaccatacagtgacataagtgaaataaaagttataacgctaaaaacaaaaaaaccagcccgtcgaaatatccttactgcgtgtcagagag

SEQ ID NO: 4844 - DNA, 250 bp, synthetic construct
  source 1..250: mol_type = other DNA
tgaagctcgcattacagtgcttagcttagcttgtggccaccagtcacatttcccgaaaagtgccacctgctagatgtcgctgcaagcaaagcgtgacatacactggataggcatatcaataacttacaaaaaacctgcaaccattcactgacataaaagttgcaaccatacagtgacatagaaataaaagttataacgctaaaaacaaaaaaaccagcccgacgcgtatgccttactgcgtgtcagagag

SEQ ID NO: 4845 - DNA, 250 bp, synthetic construct
  source 1..250: mol_type = other DNA
tgaagctcgcattacagtgcttagcttagcttgtggccaccagtcacatttcccgaaaagtgccacctgctagatgtcgctgcaagcaaagcgtgacatacactggataggcatatcaataacttacaaaaaacctgcaaccattcactgacataaaagtgatgcaaccatacagtgacataaataaaagttataacgctaaaaacaaaaaaaccagcccgagcccgccgtcttactgcgtgtcagagag

SEQ ID NO: 4846 - DNA, 250 bp, synthetic construct
  source 1..250: mol_type = other DNA
tgaagctcgcattacagtgcttagcttagcttgtggccaccagtcacatttcccgaaaagtgccacctgctagatgtcgctgcaagcaaagcgtgacatacactggataggcatatcaataacttacaaaaaacctgcaaccattcactgacataaaagtgaaatgcaaccatacagtgacatataaaagttataacgctaaaaacaaaaaaaccagcccggctacgtggacttactgcgtgtcagagag

SEQ ID NO: 4847 - DNA, 250 bp, synthetic construct
  source 1..250: mol_type = other DNA
tgaagctcgcattacagtgcttagcttagcttgtggccaccagtcacatttcccgaaaagtgccacctgctagatgtcgctgcaagcaaagcgtgacatacactggataggcatatcaataacttacaaaaaacctgcaaccattcactgacataaaagtgaaatatgcaaccatacagtgacataaaagttataacgctaaaaacaaaaaaaccagcccgccattggtgccttactgcgtgtcagagag

SEQ ID NO: 4848 - DNA, 250 bp, synthetic construct
  source 1..250: mol_type = other DNA
tgaagctcgcattacagtgcttagcttagcttgtggccaccagtcacatttcccgaaaagtgccacctgctagatgtcgctgcaagcaaagcgtgacatacactggataggcatatcaataacttacaaaaaacctgcaaccattcactgacataaaagtgaaataaatgcaaccatacagtgacataagttataacgctaaaaacaaaaaaaccagcccggttcgtgatacttactgcgtgtcagagag

SEQ ID NO: 4849 - DNA, 250 bp, synthetic construct
  source 1..250: mol_type = other DNA
tgaagctcgcattacagtgcttagcttagcttgtggccaccagtcacatttcccgaaaagtgccacctgctagatgtcgctgcaagcaaagcgtgacatacactggataggcatatcaataacttacaaaaaacctgcaaccattcactgacataaaagtgaaataaaagtgcaaccatacagtgacatattataacgctaaaaacaaaaaaaccagcccgcgtggcagctcttactgcgtgtcagagag

SEQ ID NO: 4850 - DNA, 250 bp, synthetic construct
  source 1..250: mol_type = other DNA
tgaagctcgcattacagtgcttagcttagcttgtggccaccagtcacatttcccgaaaagtgccacctgctagatgtcgctgcaagcaaagcgtgacatacactggataggcatatcaataacttacaaaaaacctgcaaccattcactgacataaaagtgaaataaaagtttgcaaccatacagtgacataataacgctaaaaacaaaaaaaccagcccgccctggagtgcttactgcgtgtcagagag

SEQ ID NO: 4851 - DNA, 250 bp, synthetic construct
  source 1..250: mol_type = other DNA
tgaagctcgcattacagtgcttagcttagcttgtggccaccagtcacatttcccgaaaagtgccacctgctagatgtcgctgcaagcaaagcgtgacatatgcaaccattcactgacataaaatgcaaccatacagtgacatacactggataggcatatcaataacttacaaaaaaccgtgaaataaaagttataacgctaaaaacaaaaaaaccagcccgctggaggtcacttactgcgtgtcagagag

SEQ ID NO: 4852 - DNA, 250 bp, synthetic construct
  source 1..250: mol_type = other DNA
tgaagctcgcattacagtgcttagcttagcttgtggccaccagtcacatttcccgaaaagtgccacctgctagatgtcgctgcaagcaaagcgtgacatactgcaaccattcactgacataaaatgcaaccatacagtgacataggataggcatatcaataacttacaaaaaaccaaagtgaaataaaagttataacgctaaaaacaaaaaaaccagcccggtatgccaggcttactgcgtgtcagagag

SEQ ID NO: 4853 - DNA, 250 bp, synthetic construct
  source 1..250: mol_type = other DNA
tgaagctcgcattacagtgcttagcttagcttgtggccaccagtcacatttcccgaaaagtgccacctgctagatgtcgctgcaagcaaagcgtgacatacactgcaaccattcactgacataaaatgcaaccatacagtgacataataggcatatcaataacttacaaaaaaccaaagtgaaataaaagttataacgctaaaaacaaaaaaaccagcccgcattgcctagcttactgcgtgtcagagag

SEQ ID NO: 4854 - DNA, 250 bp, synthetic construct
  source 1..250: mol_type = other DNA
tgaagctcgcattacagtgcttagcttagcttgtggccaccagtcacatttcccgaaaagtgccacctgctagatgtcgctgcaagcaaagcgtgacatacactgtgcaaccattcactgacataaaatgcaaccatacagtgacataaggcatatcaataacttacaaaaaaccaaagtgaaataaaagttataacgctaaaaacaaaaaaaccagcccgaccactcccccttactgcgtgtcagagag

SEQ ID NO: 4855 - DNA, 250 bp, synthetic construct
  source 1..250: mol_type = other DNA
tgaagctcgcattacagtgcttagcttagcttgtggccaccagtcacatttcccgaaaagtgccacctgctagatgtcgctgcaagcaaagcgtgacatacactggatgcaaccattcactgacataaaatgcaaccatacagtgacatagcatatcaataacttacaaaaaaccaaagtgaaataaaagttataacgctaaaaacaaaaaaaccagcccggacctggtaacttactgcgtgtcagagag

SEQ ID NO: 4856 - DNA, 250 bp, synthetic construct
  source 1..250: mol_type = other DNA
tgaagctcgcattacagtgcttagcttagcttgtggccaccagtcacatttcccgaaaagtgccacctgctagatgtcgctgcaagcaaagcgtgacatacactggatatgcaaccattcactgacataaaatgcaaccatacagtgacataatatcaataacttacaaaaaaccaaagtgaaataaaagttataacgctaaaaacaaaaaaaccagcccgtccatacctccttactgcgtgtcagagag

SEQ ID NO: 4857 - DNA, 250 bp, synthetic construct
  source 1..250: mol_type = other DNA
tgaagctcgcattacagtgcttagcttagcttgtggccaccagtcacatttcccgaaaagtgccacctgctagatgtcgctgcaagcaaagcgtgacatacactggataggtgcaaccattcactgacataaaatgcaaccatacagtgacataatcaataacttacaaaaaaccaaagtgaaataaaagttataacgctaaaaacaaaaaaaccagcccgccttcagcttcttactgcgtgtcagagag

SEQ ID NO: 4858 - DNA, 250 bp, synthetic construct
  source 1..250: mol_type = other DNA
tgaagctcgcattacagtgcttagcttagcttgtggccaccagtcacatttcccgaaaagtgccacctgctagatgtcgctgcaagcaaagcgtgacatacactggataggcatgcaaccattcactgacataaaatgcaaccatacagtgacatacaataacttacaaaaaaccaaagtgaaataaaagttataacgctaaaaacaaaaaaaccagcccgtaataagagccttactgcgtgtcagagag

SEQ ID NO: 4859 - DNA, 250 bp, synthetic construct
  source 1..250: mol_type = other DNA
tgaagctcgcattacagtgcttagcttagcttgtggccaccagtcacatttcccgaaaagtgccacctgctagatgtcgctgcaagcaaagcgtgacatacactggataggcatatgcaaccattcactgacataaaatgcaaccatacagtgacataataacttacaaaaaaccaaagtgaaataaaagttataacgctaaaaacaaaaaaaccagcccgtagggagcgacttactgcgtgtcagagag

SEQ ID NO: 4860 - DNA, 250 bp, synthetic construct
  source 1..250: mol_type = other DNA
tgaagctcgcattacagtgcttagcttagcttgtggccaccagtcacatttcccgaaaagtgccacctgctagatgtcgctgcaagcaaagcgtgacatacactggataggcatatctgcaaccattcactgacataaaatgcaaccatacagtgacataaacttacaaaaaaccaaagtgaaataaaagttataacgctaaaaacaaaaaaaccagcccgcactgatgcacttactgcgtgtcagagag

SEQ ID NO: 4861 - DNA, 250 bp, synthetic construct
  source 1..250: mol_type = other DNA
tgaagctcgcattacagtgcttagcttagcttgtggccaccagtcacatttcccgaaaagtgccacctgctagatgtcgctgcaagcaaagcgtgacatacactggataggcatatcaatgcaaccattcactgacataaaatgcaaccatacagtgacatacttacaaaaaaccaaagtgaaataaaagttataacgctaaaaacaaaaaaaccagcccgcagtagtccgcttactgcgtgtcagagag

SEQ ID NO: 4862 - DNA, 250 bp, synthetic construct
  source 1..250: mol_type = other DNA
tgaagctcgcattacagtgcttagcttagcttgtggccaccagtcacatttcccgaaaagtgccacctgctagatgtcgctgcaagcaaagcgtgacatacactggataggcatatcaatatgcaaccattcactgacataaaatgcaaccatacagtgacatatacaaaaaaccaaagtgaaataaaagttataacgctaaaaacaaaaaaaccagcccgacagttagtacttactgcgtgtcagagag

SEQ ID NO: 4863 - DNA, 250 bp, synthetic construct
  source 1..250: mol_type = other DNA
tgaagctcgcattacagtgcttagcttagcttgtggccaccagtcacatttcccgaaaagtgccacctgctagatgtcgctgcaagcaaagcgtgacatacactggataggcatatcaataactgcaaccattcactgacataaaatgcaaccatacagtgacatacaaaaaaccaaagtgaaataaaagttataacgctaaaaacaaaaaaaccagcccggtctcggccacttactgcgtgtcagagag

SEQ ID NO: 4864 - DNA, 250 bp, synthetic construct
  source 1..250: mol_type = other DNA
tgaagctcgcattacagtgcttagcttagcttgtggccaccagtcacatttcccgaaaagtgccacctgctagatgtcgctgcaagcaaagcgtgacatacactggataggcatatcaataactttgcaaccattcactgacataaaatgcaaccatacagtgacataaaaaaccaaagtgaaataaaagttataacgctaaaaacaaaaaaaccagcccgtgaatcctggcttactgcgtgtcagagag

SEQ ID NO: 4865 - DNA, 250 bp, synthetic construct
  source 1..250: mol_type = other DNA
tgaagctcgcattacagtgcttagcttagcttgtggccaccagtcacatttcccgaaaagtgccacctgctagatgtcgctgcaagcaaagcgtgacatacactggataggcatatcaataacttactgcaaccattcactgacataaaatgcaaccatacagtgacataaaaccaaagtgaaataaaagttataacgctaaaaacaaaaaaaccagcccgctcccgagttcttactgcgtgtcagagag

SEQ ID NO: 4866 - DNA, 250 bp, synthetic construct
  source 1..250: mol_type = other DNA
tgaagctcgcattacagtgcttagcttagcttgtggccaccagtcacatttcccgaaaagtgccacctgctagatgtcgctgcaagcaaagcgtgacatacactggataggcatatcaataacttacaatgcaaccattcactgacataaaatgcaaccatacagtgacataaccaaagtgaaataaaagttataacgctaaaaacaaaaaaaccagcccgcaacagcgttcttactgcgtgtcagagag

SEQ ID NO: 4867 - DNA, 250 bp, synthetic construct
  source 1..250: mol_type = other DNA
tgaagctcgcattacagtgcttagcttagcttgtggccaccagtcacatttcccgaaaagtgccacctgctagatgtcgctgcaagcaaagcgtgacatacactggataggcatatcaataacttacaaaatgcaaccattcactgacataaaatgcaaccatacagtgacatacaaagtgaaataaaagttataacgctaaaaacaaaaaaaccagcccgcgaagggccccttactgcgtgtcagagag

SEQ ID NO: 4868 - DNA, 250 bp, synthetic construct
  source 1..250: mol_type = other DNA
tgaagctcgcattacagtgcttagcttagcttgtggccaccagtcacatttcccgaaaagtgccacctgctagatgtcgctgcaagcaaagcgtgacatacactggataggcatatcaataacttacaaaaaatgcaaccattcactgacataaaatgcaaccatacagtgacataaagtgaaataaaagttataacgctaaaaacaaaaaaaccagcccggggtaatttccttactgcgtgtcagagag

SEQ ID NO: 4869 - DNA, 250 bp, synthetic construct
  source 1..250: mol_type = other DNA
tgaagctcgcattacagtgcttagcttagcttgtggccaccagtcacatttcccgaaaagtgccacctgctagatgtcgctgcaagcaaagcgtgacatacactggataggcatatcaataacttacaaaaaaccatgcaaccattcactgacataaaatgcaaccatacagtgacatatgaaataaaagttataacgctaaaaacaaaaaaaccagcccgcataatgatgcttactgcgtgtcagagag

SEQ ID NO: 4870 - DNA, 250 bp, synthetic construct
  source 1..250: mol_type = other DNA
tgaagctcgcattacagtgcttagcttagcttgtggccaccagtcacatttcccgaaaagtgccacctgctagatgtcgctgcaagcaaagcgtgacatacactggataggcatatcaataacttacaaaaaaccaaatgcaaccattcactgacataaaatgcaaccatacagtgacataaaataaaagttataacgctaaaaacaaaaaaaccagcccgagcagtgcaccttactgcgtgtcagagag

SEQ ID NO: 4871 - DNA, 250 bp, synthetic construct
  source 1..250: mol_type = other DNA
tgaagctcgcattacagtgcttagcttagcttgtggccaccagtcacatttcccgaaaagtgccacctgctagatgtcgctgcaagcaaagcgtgacatacactggataggcatatcaataacttacaaaaaaccaaagttgcaaccattcactgacataaaatgcaaccatacagtgacataataaaagttataacgctaaaaacaaaaaaaccagcccgaaaggctggacttactgcgtgtcagagag

SEQ ID NO: 4872 - DNA, 250 bp, synthetic construct
  source 1..250: mol_type = other DNA
tgaagctcgcattacagtgcttagcttagcttgtggccaccagtcacatttcccgaaaagtgccacctgctagatgtcgctgcaagcaaagcgtgacatacactggataggcatatcaataacttacaaaaaaccaaagtgatgcaaccattcactgacataaaatgcaaccatacagtgacataaaaagttataacgctaaaaacaaaaaaaccagcccgtcgccatatacttactgcgtgtcagagag

SEQ ID NO: 4873 - DNA, 250 bp, synthetic construct
  source 1..250: mol_type = other DNA
tgaagctcgcattacagtgcttagcttagcttgtggccaccagtcacatttcccgaaaagtgccacctgctagatgtcgctgcaagcaaagcgtgacatacactggataggcatatcaataacttacaaaaaaccaaagtgaaatgcaaccattcactgacataaaatgcaaccatacagtgacataaagttataacgctaaaaacaaaaaaaccagcccgaacgtccagtcttactgcgtgtcagagag

SEQ ID NO: 4874 - DNA, 250 bp, synthetic construct
  source 1..250: mol_type = other DNA
tgaagctcgcattacagtgcttagcttagcttgtggccaccagtcacatttcccgaaaagtgccacctgctagatgtcgctgcaagcaaagcgtgacatacactggataggcatatcaataacttacaaaaaaccaaagtgaaatatgcaaccattcactgacataaaatgcaaccatacagtgacatagttataacgctaaaaacaaaaaaaccagcccgaagccaaggtcttactgcgtgtcagagag

SEQ ID NO: 4875 - DNA, 250 bp, synthetic construct
  source 1..250: mol_type = other DNA
tgaagctcgcattacagtgcttagcttagcttgtggccaccagtcacatttcccgaaaagtgccacctgctagatgtcgctgcaagcaaagcgtgacatacactggataggcatatcaataacttacaaaaaaccaaagtgaaataaatgcaaccattcactgacataaaatgcaaccatacagtgacatatataacgctaaaaacaaaaaaaccagcccgtccaggatcacttactgcgtgtcagagag

SEQ ID NO: 4876 - DNA, 250 bp, synthetic construct
  source 1..250: mol_type = other DNA
tgaagctcgcattacagtgcttagcttagcttgtggccaccagtcacatttcccgaaaagtgccacctgctagatgtcgctgcaagcaaagcgtgacatacactggataggcatatcaataacttacaaaaaaccaaagtgaaataaaagtgcaaccattcactgacataaaatgcaaccatacagtgacatataacgctaaaaacaaaaaaaccagcccgccccgtgtagcttactgcgtgtcagagag

SEQ ID NO: 4877 - DNA, 250 bp, synthetic construct
  source 1..250: mol_type = other DNA
tgaagctcgcattacagtgcttagcttagcttgtggccaccagtcacatttcccgaaaagtgccacctgctagatgtcgctgcaagcaaagcgtgacataactggataggcatatcaataacttacaaaaaaccactggataggcatatcaataacttacaaaaaacctgcaaccattcactgacataaaatgcaaccatacagtgacatagtgaaataaaacctcccgaccttactgcgtgtcagagag

SEQ ID NO: 4878 - DNA, 250 bp, synthetic construct
  source 1..250: mol_type = other DNA
tgaagctcgcattacagtgcttagcttagcttgtggccaccagtcacatttcccgaaaagtgccacctgctagatgtcgctgcaagcaaagcgtgacataaaaaaacgcgctgcaaccattcactgacataaaatgcaaccatacagtgacatagtgaaataaaagttataacgctaaaaacaaaacactggataggcatatcaataacttacaaaaaacctcctaacactcttactgcgtgtcagagag

SEQ ID NO: 4879 - DNA, 250 bp, synthetic construct
  source 1..250: mol_type = other DNA
tgaagctcgcattacagtgcttagcttagcttgtggccaccagtcacatttcccgaaaagtgccacctgctagatgtcgctgcaagcaaagcgtgacataaaaaaacgcgcaaaaaacgcgctgcaaccattcactgacataaaatgcaaccatacagtgacatagtgaaataaaagttataacgccactggataggcatatcaataacttacaaaaaaccacacaagatgcttactgcgtgtcagagag

SEQ ID NO: 4880 - DNA, 250 bp, synthetic construct
  source 1..250: mol_type = other DNA
tgaagctcgcattacagtgcttagcttagcttgtggccaccagtcacatttcccgaaaagtgccacctgctagatgtcgctgcaagcaaagcgtgacataaaaaaacgcgcaaaaaacgcgcaaaaaacgcgctgcaaccattcactgacataaaatgcaaccatacagtgacatagtgaaataaaagttataacgccactggataggcatatcaataactatcatagcagcttactgcgtgtcagagag

SEQ ID NO: 4881 - DNA, 250 bp, synthetic construct
  source 1..250: mol_type = other DNA
tgaagctcgcattacagtgcttagcttagcttgtggccaccagtcacatttcccgaaaagtgccacctgctagatgtcgctgcaagcaaagcgtgacataaaaaaacgcgcaaaaaacgcgcaaaaaacgcgcaaaaaacgcgctgcaaccattcactgacataaaatgcaaccatacagtgacatagtgaaataaaagttataacgccactggataggcatccagatgcgcttactgcgtgtcagagag

SEQ ID NO: 4882 - DNA, 250 bp, synthetic construct
  source 1..250: mol_type = other DNA
tgaagctcgcattacagtgcttagcttagcttgtggccaccagtcacatttcccgaaaagtgccacctgctagatgtcgctgcaagcaaagcgtgacataaaaaaacgcgcaaaaaacgcgcaaaaaacgcgcaaaaaacgcgcaaaaaacgcgctgcaaccattcactgacataaaatgcaaccatacagtgacatagtgaaataaaagttataacgccaaagaggaaggcttactgcgtgtcagagag

SEQ ID NO: 4883 - DNA, 250 bp, synthetic construct
  source 1..250: mol_type = other DNA
tgaagctcgcattacagtgcttagcttagcttgtggccaccagtcacatttcccgaaaagtgccacctgctagatgtcgctgcaagcaaagcgtgacataaaaaaacgcgcaaaaaacgcgcaaaaaacgcgcaaaaaacgcgcaaaaaacgcgcaaaaaacgcgctgcaaccattcactgacataaaatgcaaccatacagtgacatagtgaaataaaaggacgccttcacttactgcgtgtcagagag

SEQ ID NO: 4884 - DNA, 250 bp, synthetic construct
  source 1..250: mol_type = other DNA
tgaagctcgcattacagtgcttagcttagcttgtggccaccagtcacatttcccgaaaagtgccacctgctagatgtcgctgcaagcaaagcgtgacataaaaaaacgcgcaaaaaacgcgcaaaaaacgcgcaaaaaacgcgcaaaaaacgcgcaaaaaacgcgcaaaaaacgcgctgcaaccattcactgacataaaatgcaaccatacagtgacataggtattgaaagcttactgcgtgtcagagag

SEQ ID NO: 4885 - DNA, 250 bp, synthetic construct
  source 1..250: mol_type = other DNA
tgaagctcgcattacagtgcttagcttagcttgtggccaccagtcacatttcccgaaaagtgccacctgctagatgtcgctgcaagcaaagcgtgacataaaaaaacgcgcaaaaaagcgcaaaaaacgcgcaaaaaagcgcaaaaaacgcgcaaaaaatgcaaccattcactgacataaaatgcaaccatacagtgacatagtgaaataaaagttataactgacccacgtcttactgcgtgtcagagag

SEQ ID NO: 4886 - DNA, 250 bp, synthetic construct
  source 1..250: mol_type = other DNA
tgaagctcgcattacagtgcttagcttagcttgtggccaccagtcacatttcccgaaaagtgccacctgctagatgtcgctgcaaccatagtttgacatacactggataggcatatcaataacttacaaaaaacctgcaaccatagtttgacataaaatgcaaccatagtttgacatagtgaaataaaagttataacgctaaaaacaaaaaaaccagcccgataccaagggcttactgcgtgtcagagag

SEQ ID NO: 4887 - DNA, 250 bp, synthetic construct
  source 1..250: mol_type = other DNA
tgaagctcgcattacagtgcttagcttagcttgtggccaccagtcacatttcccgaaaagtgccacctgctagatgtcgctgcaaccatagtttgacatacactggataggcatatcaataacttacaaaaaacctgcaaccatagtttgacataaaatgcaaccataccttgacatagtgaaataaaagttataacgctaaaaacaaaaaaaccagcccgggcggaggagcttactgcgtgtcagagag

SEQ ID NO: 4888 - DNA, 250 bp, synthetic construct
  source 1..250: mol_type = other DNA
tgaagctcgcattacagtgcttagcttagcttgtggccaccagtcacatttcccgaaaagtgccacctgctagatgtcgctgcaaccatagtttgacatacactggataggcatatcaataacttacaaaaaacctgcaaccatagtttgacataaaataaagtcatactctgacatagtgaaataaaagttataacgctaaaaacaaaaaaaccagcccgataagccaagcttactgcgtgtcagagag

SEQ ID NO: 4889 - DNA, 250 bp, synthetic construct
  source 1..250: mol_type = other DNA
tgaagctcgcattacagtgcttagcttagcttgtggccaccagtcacatttcccgaaaagtgccacctgctagatgtcgctgcaaccatagtttgacatacactggataggcatatcaataacttacaaaaaacctgcaaccatagtttgacataaaatgcaagcaaagcgtgacatagtgaaataaaagttataacgctaaaaacaaaaaaaccagcccgggtctatttacttactgcgtgtcagagag

SEQ ID NO: 4890 - DNA, 250 bp, synthetic construct
  source 1..250: mol_type = other DNA
tgaagctcgcattacagtgcttagcttagcttgtggccaccagtcacatttcccgaaaagtgccacctgctagatgtcgctgcaaccatagtttgacatacactggataggcatatcaataacttacaaaaaacctgcaaccatagtttgacataaaatgcaaccattcactgacatagtgaaataaaagttataacgctaaaaacaaaaaaaccagcccggatcaaactccttactgcgtgtcagagag

SEQ ID NO: 4891 - DNA, 250 bp, synthetic construct
  source 1..250: mol_type = other DNA
tgaagctcgcattacagtgcttagcttagcttgtggccaccagtcacatttcccgaaaagtgccacctgctagatgtcgctgcaaccatagtttgacatacactggataggcatatcaataacttacaaaaaacctgcaaccatagtttgacataaaatgcaaccatacagtgacatagtgaaataaaagttataacgctaaaaacaaaaaaaccagcccgatgggtgttccttactgcgtgtcagagag

SEQ ID NO: 4892 - DNA, 250 bp, synthetic construct
  source 1..250: mol_type = other DNA
tgaagctcgcattacagtgcttagcttagcttgtggccaccagtcacatttcccgaaaagtgccacctgctagatgtcgctgcaaccatagtttgacatacactggataggcatatcaataacttacaaaaaacctgcaaccataccttgacataaaatgcaaccatagtttgacatagtgaaataaaagttataacgctaaaaacaaaaaaaccagcccgtagattagaccttactgcgtgtcagagag

SEQ ID NO: 4893 - DNA, 250 bp, synthetic construct
  source 1..250: mol_type = other DNA
tgaagctcgcattacagtgcttagcttagcttgtggccaccagtcacatttcccgaaaagtgccacctgctagatgtcgctgcaaccatagtttgacatacactggataggcatatcaataacttacaaaaaacctgcaaccataccttgacataaaatgcaaccataccttgacatagtgaaataaaagttataacgctaaaaacaaaaaaaccagcccggcctcacgagcttactgcgtgtcagagag

SEQ ID NO: 4894 - DNA, 250 bp, synthetic construct
  source 1..250: mol_type = other DNA
tgaagctcgcattacagtgcttagcttagcttgtggccaccagtcacatttcccgaaaagtgccacctgctagatgtcgctgcaaccatagtttgacatacactggataggcatatcaataacttacaaaaaacctgcaaccataccttgacataaaataaagtcatactctgacatagtgaaataaaagttataacgctaaaaacaaaaaaaccagcccgccgtgtaccacttactgcgtgtcagagag

SEQ ID NO: 4895 - DNA, 250 bp, synthetic construct
  source 1..250: mol_type = other DNA
tgaagctcgcattacagtgcttagcttagcttgtggccaccagtcacatttcccgaaaagtgccacctgctagatgtcgctgcaaccatagtttgacatacactggataggcatatcaataacttacaaaaaacctgcaaccataccttgacataaaatgcaagcaaagcgtgacatagtgaaataaaagttataacgctaaaaacaaaaaaaccagcccgttaagtcctgcttactgcgtgtcagagag

SEQ ID NO: 4896 - DNA, 250 bp, synthetic construct
  source 1..250: mol_type = other DNA
tgaagctcgcattacagtgcttagcttagcttgtggccaccagtcacatttcccgaaaagtgccacctgctagatgtcgctgcaaccatagtttgacatacactggataggcatatcaataacttacaaaaaacctgcaaccataccttgacataaaatgcaaccattcactgacatagtgaaataaaagttataacgctaaaaacaaaaaaaccagcccgatcgtccccccttactgcgtgtcagagag

SEQ ID NO: 4897 - DNA, 250 bp, synthetic construct
  source 1..250: mol_type = other DNA
tgaagctcgcattacagtgcttagcttagcttgtggccaccagtcacatttcccgaaaagtgccacctgctagatgtcgctgcaaccatagtttgacatacactggataggcatatcaataacttacaaaaaacctgcaaccataccttgacataaaatgcaaccatacagtgacatagtgaaataaaagttataacgctaaaaacaaaaaaaccagcccgatggcggtctcttactgcgtgtcagagag

SEQ ID NO: 4898 - DNA, 250 bp, synthetic construct
  source 1..250: mol_type = other DNA
tgaagctcgcattacagtgcttagcttagcttgtggccaccagtcacatttcccgaaaagtgccacctgctagatgtcgctgcaaccatagtttgacatacactggataggcatatcaataacttacaaaaaacctaaagtcatactctgacataaaatgcaaccatagtttgacatagtgaaataaaagttataacgctaaaaacaaaaaaaccagcccgttaaacggttcttactgcgtgtcagagag

SEQ ID NO: 4899 - DNA, 250 bp, synthetic construct
  source 1..250: mol_type = other DNA
tgaagctcgcattacagtgcttagcttagcttgtggccaccagtcacatttcccgaaaagtgccacctgctagatgtcgctgcaaccatagtttgacatacactggataggcatatcaataacttacaaaaaacctaaagtcatactctgacataaaatgcaaccataccttgacatagtgaaataaaagttataacgctaaaaacaaaaaaaccagcccgtactccgaaacttactgcgtgtcagagag

SEQ ID NO: 4900 - DNA, 250 bp, synthetic construct
  source 1..250: mol_type = other DNA
tgaagctcgcattacagtgcttagcttagcttgtggccaccagtcacatttcccgaaaagtgccacctgctagatgtcgctgcaaccatagtttgacatacactggataggcatatcaataacttacaaaaaacctaaagtcatactctgacataaaataaagtcatactctgacatagtgaaataaaagttataacgctaaaaacaaaaaaaccagcccgcgcactgacgcttactgcgtgtcagagag

SEQ ID NO: 4901 - DNA, 250 bp, synthetic construct
  source 1..250: mol_type = other DNA
tgaagctcgcattacagtgcttagcttagcttgtggccaccagtcacatttcccgaaaagtgccacctgctagatgtcgctgcaaccatagtttgacatacactggataggcatatcaataacttacaaaaaacctaaagtcatactctgacataaaatgcaagcaaagcgtgacatagtgaaataaaagttataacgctaaaaacaaaaaaaccagcccggctgcggagacttactgcgtgtcagagag

SEQ ID NO: 4902 - DNA, 250 bp, synthetic construct
  source 1..250: mol_type = other DNA
tgaagctcgcattacagtgcttagcttagcttgtggccaccagtcacatttcccgaaaagtgccacctgctagatgtcgctgcaaccatagtttgacatacactggataggcatatcaataacttacaaaaaacctaaagtcatactctgacataaaatgcaaccattcactgacatagtgaaataaaagttataacgctaaaaacaaaaaaaccagcccgcttgtccctccttactgcgtgtcagagag

SEQ ID NO: 4903 - DNA, 250 bp, synthetic construct
  source 1..250: mol_type = other DNA
tgaagctcgcattacagtgcttagcttagcttgtggccaccagtcacatttcccgaaaagtgccacctgctagatgtcgctgcaaccatagtttgacatacactggataggcatatcaataacttacaaaaaacctaaagtcatactctgacataaaatgcaaccatacagtgacatagtgaaataaaagttataacgctaaaaacaaaaaaaccagcccgagactgtgcccttactgcgtgtcagagag

SEQ ID NO: 4904 - DNA, 250 bp, synthetic construct
  source 1..250: mol_type = other DNA
tgaagctcgcattacagtgcttagcttagcttgtggccaccagtcacatttcccgaaaagtgccacctgctagatgtcgctgcaaccatagtttgacatacactggataggcatatcaataacttacaaaaaacctgcaagcaaagcgtgacataaaatgcaaccatagtttgacatagtgaaataaaagttataacgctaaaaacaaaaaaaccagcccgaccttgaccgcttactgcgtgtcagagag

SEQ ID NO: 4905 - DNA, 250 bp, synthetic construct
  source 1..250: mol_type = other DNA
tgaagctcgcattacagtgcttagcttagcttgtggccaccagtcacatttcccgaaaagtgccacctgctagatgtcgctgcaaccatagtttgacatacactggataggcatatcaataacttacaaaaaacctgcaagcaaagcgtgacataaaatgcaaccataccttgacatagtgaaataaaagttataacgctaaaaacaaaaaaaccagcccgccgtgttgatcttactgcgtgtcagagag

SEQ ID NO: 4906 - DNA, 250 bp, synthetic construct
  source 1..250: mol_type = other DNA
tgaagctcgcattacagtgcttagcttagcttgtggccaccagtcacatttcccgaaaagtgccacctgctagatgtcgctgcaaccatagtttgacatacactggataggcatatcaataacttacaaaaaacctgcaagcaaagcgtgacataaaataaagtcatactctgacatagtgaaataaaagttataacgctaaaaacaaaaaaaccagcccgttatttctgacttactgcgtgtcagagag

SEQ ID NO: 4907 - DNA, 250 bp, synthetic construct
  source 1..250: mol_type = other DNA
tgaagctcgcattacagtgcttagcttagcttgtggccaccagtcacatttcccgaaaagtgccacctgctagatgtcgctgcaaccatagtttgacatacactggataggcatatcaataacttacaaaaaacctgcaagcaaagcgtgacataaaatgcaagcaaagcgtgacatagtgaaataaaagttataacgctaaaaacaaaaaaaccagcccgacggagggctcttactgcgtgtcagagag

SEQ ID NO: 4908 - DNA, 250 bp, synthetic construct
  source 1..250: mol_type = other DNA
tgaagctcgcattacagtgcttagcttagcttgtggccaccagtcacatttcccgaaaagtgccacctgctagatgtcgctgcaaccatagtttgacatacactggataggcatatcaataacttacaaaaaacctgcaagcaaagcgtgacataaaatgcaaccattcactgacatagtgaaataaaagttataacgctaaaaacaaaaaaaccagcccgttccttggttcttactgcgtgtcagagag

SEQ ID NO: 4909 - DNA, 250 bp, synthetic construct
  source 1..250: mol_type = other DNA
tgaagctcgcattacagtgcttagcttagcttgtggccaccagtcacatttcccgaaaagtgccacctgctagatgtcgctgcaaccatagtttgacatacactggataggcatatcaataacttacaaaaaacctgcaagcaaagcgtgacataaaatgcaaccatacagtgacatagtgaaataaaagttataacgctaaaaacaaaaaaaccagcccgcgcgactgctcttactgcgtgtcagagag

SEQ ID NO: 4910 - DNA, 250 bp, synthetic construct
  source 1..250: mol_type = other DNA
tgaagctcgcattacagtgcttagcttagcttgtggccaccagtcacatttcccgaaaagtgccacctgctagatgtcgctgcaaccatagtttgacatacactggataggcatatcaataacttacaaaaaacctgcaaccattcactgacataaaatgcaaccatagtttgacatagtgaaataaaagttataacgctaaaaacaaaaaaaccagcccggctgcccaagcttactgcgtgtcagagag

SEQ ID NO: 4911 - DNA, 250 bp, synthetic construct
  source 1..250: mol_type = other DNA
tgaagctcgcattacagtgcttagcttagcttgtggccaccagtcacatttcccgaaaagtgccacctgctagatgtcgctgcaaccatagtttgacatacactggataggcatatcaataacttacaaaaaacctgcaaccattcactgacataaaatgcaaccataccttgacatagtgaaataaaagttataacgctaaaaacaaaaaaaccagcccgcggccactgtcttactgcgtgtcagagag

SEQ ID NO: 4912 - DNA, 250 bp, synthetic construct
  source 1..250: mol_type = other DNA
tgaagctcgcattacagtgcttagcttagcttgtggccaccagtcacatttcccgaaaagtgccacctgctagatgtcgctgcaaccatagtttgacatacactggataggcatatcaataacttacaaaaaacctgcaaccattcactgacataaaataaagtcatactctgacatagtgaaataaaagttataacgctaaaaacaaaaaaaccagcccggtaggaatcgcttactgcgtgtcagagag

SEQ ID NO: 4913 - DNA, 250 bp, synthetic construct
  source 1..250: mol_type = other DNA
tgaagctcgcattacagtgcttagcttagcttgtggccaccagtcacatttcccgaaaagtgccacctgctagatgtcgctgcaaccatagtttgacatacactggataggcatatcaataacttacaaaaaacctgcaaccattcactgacataaaatgcaagcaaagcgtgacatagtgaaataaaagttataacgctaaaaacaaaaaaaccagcccgcacagacgcccttactgcgtgtcagagag

SEQ ID NO: 4914 - DNA, 250 bp, synthetic construct
  source 1..250: mol_type = other DNA
tgaagctcgcattacagtgcttagcttagcttgtggccaccagtcacatttcccgaaaagtgccacctgctagatgtcgctgcaaccatagtttgacatacactggataggcatatcaataacttacaaaaaacctgcaaccattcactgacataaaatgcaaccattcactgacatagtgaaataaaagttataacgctaaaaacaaaaaaaccagcccgaatactcgctcttactgcgtgtcagagag

SEQ ID NO: 4915 - DNA, 250 bp, synthetic construct
  source 1..250: mol_type = other DNA
tgaagctcgcattacagtgcttagcttagcttgtggccaccagtcacatttcccgaaaagtgccacctgctagatgtcgctgcaaccatagtttgacatacactggataggcatatcaataacttacaaaaaacctgcaaccattcactgacataaaatgcaaccatacagtgacatagtgaaataaaagttataacgctaaaaacaaaaaaaccagcccggacaaactcacttactgcgtgtcagagag

SEQ ID NO: 4916 - DNA, 250 bp, synthetic construct
  source 1..250: mol_type = other DNA
tgaagctcgcattacagtgcttagcttagcttgtggccaccagtcacatttcccgaaaagtgccacctgctagatgtcgctgcaaccatagtttgacatacactggataggcatatcaataacttacaaaaaacctgcaaccatacagtgacataaaatgcaaccatagtttgacatagtgaaataaaagttataacgctaaaaacaaaaaaaccagcccgccaagaggaacttactgcgtgtcagagag

SEQ ID NO: 4917 - DNA, 250 bp, synthetic construct
  source 1..250: mol_type = other DNA
tgaagctcgcattacagtgcttagcttagcttgtggccaccagtcacatttcccgaaaagtgccacctgctagatgtcgctgcaaccatagtttgacatacactggataggcatatcaataacttacaaaaaacctgcaaccatacagtgacataaaatgcaaccataccttgacatagtgaaataaaagttataacgctaaaaacaaaaaaaccagcccgtcatcctcaccttactgcgtgtcagagag

SEQ ID NO: 4918 - DNA, 250 bp, synthetic construct
  source 1..250: mol_type = other DNA
tgaagctcgcattacagtgcttagcttagcttgtggccaccagtcacatttcccgaaaagtgccacctgctagatgtcgctgcaaccatagtttgacatacactggataggcatatcaataacttacaaaaaacctgcaaccatacagtgacataaaataaagtcatactctgacatagtgaaataaaagttataacgctaaaaacaaaaaaaccagcccgtagacagttgcttactgcgtgtcagagag

SEQ ID NO: 4919 - DNA, 250 bp, synthetic construct
  source 1..250: mol_type = other DNA
tgaagctcgcattacagtgcttagcttagcttgtggccaccagtcacatttcccgaaaagtgccacctgctagatgtcgctgcaaccatagtttgacatacactggataggcatatcaataacttacaaaaaacctgcaaccatacagtgacataaaatgcaagcaaagcgtgacatagtgaaataaaagttataacgctaaaaacaaaaaaaccagcccgcattcgccttcttactgcgtgtcagagag

SEQ ID NO: 4920 - DNA, 250 bp, synthetic construct
  source 1..250: mol_type = other DNA
tgaagctcgcattacagtgcttagcttagcttgtggccaccagtcacatttcccgaaaagtgccacctgctagatgtcgctgcaaccatagtttgacatacactggataggcatatcaataacttacaaaaaacctgcaaccatacagtgacataaaatgcaaccattcactgacatagtgaaataaaagttataacgctaaaaacaaaaaaaccagcccgactaatttcccttactgcgtgtcagagag

SEQ ID NO: 4921 - DNA, 250 bp, synthetic construct
  source 1..250: mol_type = other DNA
tgaagctcgcattacagtgcttagcttagcttgtggccaccagtcacatttcccgaaaagtgccacctgctagatgtcgctgcaaccatagtttgacatacactggataggcatatcaataacttacaaaaaacctgcaaccatacagtgacataaaatgcaaccatacagtgacatagtgaaataaaagttataacgctaaaaacaaaaaaaccagcccgaacatacgggcttactgcgtgtcagagag

SEQ ID NO: 4922 - DNA, 250 bp, synthetic construct
  source 1..250: mol_type = other DNA
tgaagctcgcattacagtgcttagcttagcttgtggccaccagtcacatttcccgaaaagtgccacctgctagatgtcgctgcaaccataccttgacatacactggataggcatatcaataacttacaaaaaacctgcaaccatagtttgacataaaatgcaaccatagtttgacatagtgaaataaaagttataacgctaaaaacaaaaaaaccagcccgtaatggattgcttactgcgtgtcagagag

SEQ ID NO: 4923 - DNA, 250 bp, synthetic construct
  source 1..250: mol_type = other DNA
tgaagctcgcattacagtgcttagcttagcttgtggccaccagtcacatttcccgaaaagtgccacctgctagatgtcgctgcaaccataccttgacatacactggataggcatatcaataacttacaaaaaacctgcaaccatagtttgacataaaatgcaaccataccttgacatagtgaaataaaagttataacgctaaaaacaaaaaaaccagcccgggataggacccttactgcgtgtcagagag

SEQ ID NO: 4924 - DNA, 250 bp, synthetic construct
  source 1..250: mol_type = other DNA
tgaagctcgcattacagtgcttagcttagcttgtggccaccagtcacatttcccgaaaagtgccacctgctagatgtcgctgcaaccataccttgacatacactggataggcatatcaataacttacaaaaaacctgcaaccatagtttgacataaaataaagtcatactctgacatagtgaaataaaagttataacgctaaaaacaaaaaaaccagcccggctgcaattgcttactgcgtgtcagagag

SEQ ID NO: 4925 - DNA, 250 bp, synthetic construct
  source 1..250: mol_type = other DNA
tgaagctcgcattacagtgcttagcttagcttgtggccaccagtcacatttcccgaaaagtgccacctgctagatgtcgctgcaaccataccttgacatacactggataggcatatcaataacttacaaaaaacctgcaaccatagtttgacataaaatgcaagcaaagcgtgacatagtgaaataaaagttataacgctaaaaacaaaaaaaccagcccgaatcctgtatcttactgcgtgtcagagag

SEQ ID NO: 4926 - DNA, 250 bp, synthetic construct
  source 1..250: mol_type = other DNA
tgaagctcgcattacagtgcttagcttagcttgtggccaccagtcacatttcccgaaaagtgccacctgctagatgtcgctgcaaccataccttgacatacactggataggcatatcaataacttacaaaaaacctgcaaccatagtttgacataaaatgcaaccattcactgacatagtgaaataaaagttataacgctaaaaacaaaaaaaccagcccgactcatcggtcttactgcgtgtcagagag

SEQ ID NO: 4927 - DNA, 250 bp, synthetic construct
  source 1..250: mol_type = other DNA
tgaagctcgcattacagtgcttagcttagcttgtggccaccagtcacatttcccgaaaagtgccacctgctagatgtcgctgcaaccataccttgacatacactggataggcatatcaataacttacaaaaaacctgcaaccatagtttgacataaaatgcaaccatacagtgacatagtgaaataaaagttataacgctaaaaacaaaaaaaccagcccgtaaatctacccttactgcgtgtcagagag

SEQ ID NO: 4928 - DNA, 250 bp, synthetic construct
  source 1..250: mol_type = other DNA
tgaagctcgcattacagtgcttagcttagcttgtggccaccagtcacatttcccgaaaagtgccacctgctagatgtcgctgcaaccataccttgacatacactggataggcatatcaataacttacaaaaaacctgcaaccataccttgacataaaatgcaaccatagtttgacatagtgaaataaaagttataacgctaaaaacaaaaaaaccagcccggtaatgattgcttactgcgtgtcagagag

SEQ ID NO: 4929 - DNA, 250 bp, synthetic construct
  source 1..250: mol_type = other DNA
tgaagctcgcattacagtgcttagcttagcttgtggccaccagtcacatttcccgaaaagtgccacctgctagatgtcgctgcaaccataccttgacatacactggataggcatatcaataacttacaaaaaacctgcaaccataccttgacataaaatgcaaccataccttgacatagtgaaataaaagttataacgctaaaaacaaaaaaaccagcccgcaatggccaccttactgcgtgtcagagag

SEQ ID NO: 4930 - DNA, 250 bp, synthetic construct
  source 1..250: mol_type = other DNA
tgaagctcgcattacagtgcttagcttagcttgtggccaccagtcacatttcccgaaaagtgccacctgctagatgtcgctgcaaccataccttgacatacactggataggcatatcaataacttacaaaaaacctgcaaccataccttgacataaaataaagtcatactctgacatagtgaaataaaagttataacgctaaaaacaaaaaaaccagcccgtataataactcttactgcgtgtcagagag

SEQ ID NO: 4931 - DNA, 250 bp, synthetic construct
  source 1..250: mol_type = other DNA
tgaagctcgcattacagtgcttagcttagcttgtggccaccagtcacatttcccgaaaagtgccacctgctagatgtcgctgcaaccataccttgacatacactggataggcatatcaataacttacaaaaaacctgcaaccataccttgacataaaatgcaagcaaagcgtgacatagtgaaataaaagttataacgctaaaaacaaaaaaaccagcccgagttcatcagcttactgcgtgtcagagag

SEQ ID NO: 4932 - DNA, 250 bp, synthetic construct
  source 1..250: mol_type = other DNA
tgaagctcgcattacagtgcttagcttagcttgtggccaccagtcacatttcccgaaaagtgccacctgctagatgtcgctgcaaccataccttgacatacactggataggcatatcaataacttacaaaaaacctgcaaccataccttgacataaaatgcaaccattcactgacatagtgaaataaaagttataacgctaaaaacaaaaaaaccagcccggttgccaacccttactgcgtgtcagagag

SEQ ID NO: 4933 - DNA, 250 bp, synthetic construct
  source 1..250: mol_type = other DNA
tgaagctcgcattacagtgcttagcttagcttgtggccaccagtcacatttcccgaaaagtgccacctgctagatgtcgctgcaaccataccttgacatacactggataggcatatcaataacttacaaaaaacctgcaaccataccttgacataaaatgcaaccatacagtgacatagtgaaataaaagttataacgctaaaaacaaaaaaaccagcccgcctccaatgacttactgcgtgtcagagag

SEQ ID NO: 4934 - DNA, 250 bp, synthetic construct
  source 1..250: mol_type = other DNA
tgaagctcgcattacagtgcttagcttagcttgtggccaccagtcacatttcccgaaaagtgccacctgctagatgtcgctgcaaccataccttgacatacactggataggcatatcaataacttacaaaaaacctaaagtcatactctgacataaaatgcaaccatagtttgacatagtgaaataaaagttataacgctaaaaacaaaaaaaccagcccgcagtatcaggcttactgcgtgtcagagag

SEQ ID NO: 4935 - DNA, 250 bp, synthetic construct
  source 1..250: mol_type = other DNA
tgaagctcgcattacagtgcttagcttagcttgtggccaccagtcacatttcccgaaaagtgccacctgctagatgtcgctgcaaccataccttgacatacactggataggcatatcaataacttacaaaaaacctaaagtcatactctgacataaaatgcaaccataccttgacatagtgaaataaaagttataacgctaaaaacaaaaaaaccagcccgtcctcttacacttactgcgtgtcagagag

SEQ ID NO: 4936 - DNA, 250 bp, synthetic construct
  source 1..250: mol_type = other DNA
tgaagctcgcattacagtgcttagcttagcttgtggccaccagtcacatttcccgaaaagtgccacctgctagatgtcgctgcaaccataccttgacatacactggataggcatatcaataacttacaaaaaacctaaagtcatactctgacataaaataaagtcatactctgacatagtgaaataaaagttataacgctaaaaacaaaaaaaccagcccgttagcaaccccttactgcgtgtcagagag

SEQ ID NO: 4937 - DNA, 250 bp, synthetic construct
  source 1..250: mol_type = other DNA
tgaagctcgcattacagtgcttagcttagcttgtggccaccagtcacatttcccgaaaagtgccacctgctagatgtcgctgcaaccataccttgacatacactggataggcatatcaataacttacaaaaaacctaaagtcatactctgacataaaatgcaagcaaagcgtgacatagtgaaataaaagttataacgctaaaaacaaaaaaaccagcccggcaacggacccttactgcgtgtcagagag

SEQ ID NO: 4938 - DNA, 250 bp, synthetic construct
  source 1..250: mol_type = other DNA
tgaagctcgcattacagtgcttagcttagcttgtggccaccagtcacatttcccgaaaagtgccacctgctagatgtcgctgcaaccataccttgacatacactggataggcatatcaataacttacaaaaaacctaaagtcatactctgacataaaatgcaaccattcactgacatagtgaaataaaagttataacgctaaaaacaaaaaaaccagcccgcatcactatgcttactgcgtgtcagagag

SEQ ID NO: 4939 - DNA, 250 bp, synthetic construct
  source 1..250: mol_type = other DNA
tgaagctcgcattacagtgcttagcttagcttgtggccaccagtcacatttcccgaaaagtgccacctgctagatgtcgctgcaaccataccttgacatacactggataggcatatcaataacttacaaaaaacctaaagtcatactctgacataaaatgcaaccatacagtgacatagtgaaataaaagttataacgctaaaaacaaaaaaaccagcccgcttggccgggcttactgcgtgtcagagag

SEQ ID NO: 4940 - DNA, 250 bp, synthetic construct
  source 1..250: mol_type = other DNA
tgaagctcgcattacagtgcttagcttagcttgtggccaccagtcacatttcccgaaaagtgccacctgctagatgtcgctgcaaccataccttgacatacactggataggcatatcaataacttacaaaaaacctgcaagcaaagcgtgacataaaatgcaaccatagtttgacatagtgaaataaaagttataacgctaaaaacaaaaaaaccagcccgatgatgtgtgcttactgcgtgtcagagag

SEQ ID NO: 4941 - DNA, 250 bp, synthetic construct
  source 1..250: mol_type = other DNA
tgaagctcgcattacagtgcttagcttagcttgtggccaccagtcacatttcccgaaaagtgccacctgctagatgtcgctgcaaccataccttgacatacactggataggcatatcaataacttacaaaaaacctgcaagcaaagcgtgacataaaatgcaaccataccttgacatagtgaaataaaagttataacgctaaaaacaaaaaaaccagcccgtgatgtacttcttactgcgtgtcagagag

SEQ ID NO: 4942 - DNA, 250 bp, synthetic construct
  source 1..250: mol_type = other DNA
tgaagctcgcattacagtgcttagcttagcttgtggccaccagtcacatttcccgaaaagtgccacctgctagatgtcgctgcaaccataccttgacatacactggataggcatatcaataacttacaaaaaacctgcaagcaaagcgtgacataaaataaagtcatactctgacatagtgaaataaaagttataacgctaaaaacaaaaaaaccagcccgagctacgttccttactgcgtgtcagagag

SEQ ID NO: 4943 - DNA, 250 bp, synthetic construct
  source 1..250: mol_type = other DNA
tgaagctcgcattacagtgcttagcttagcttgtggccaccagtcacatttcccgaaaagtgccacctgctagatgtcgctgcaaccataccttgacatacactggataggcatatcaataacttacaaaaaacctgcaagcaaagcgtgacataaaatgcaagcaaagcgtgacatagtgaaataaaagttataacgctaaaaacaaaaaaaccagcccgcggtgttcgtcttactgcgtgtcagagag

SEQ ID NO: 4944 - DNA, 250 bp, synthetic construct
  source 1..250: mol_type = other DNA
tgaagctcgcattacagtgcttagcttagcttgtggccaccagtcacatttcccgaaaagtgccacctgctagatgtcgctgcaaccataccttgacatacactggataggcatatcaataacttacaaaaaacctgcaagcaaagcgtgacataaaatgcaaccattcactgacatagtgaaataaaagttataacgctaaaaacaaaaaaaccagcccgcagctggaagcttactgcgtgtcagagag

SEQ ID NO: 4945 - DNA, 250 bp, synthetic construct
  source 1..250: mol_type = other DNA
tgaagctcgcattacagtgcttagcttagcttgtggccaccagtcacatttcccgaaaagtgccacctgctagatgtcgctgcaaccataccttgacatacactggataggcatatcaataacttacaaaaaacctgcaagcaaagcgtgacataaaatgcaaccatacagtgacatagtgaaataaaagttataacgctaaaaacaaaaaaaccagcccgcgtattgtaacttactgcgtgtcagagag

SEQ ID NO: 4946 - DNA, 250 bp, synthetic construct
  source 1..250: mol_type = other DNA
tgaagctcgcattacagtgcttagcttagcttgtggccaccagtcacatttcccgaaaagtgccacctgctagatgtcgctgcaaccataccttgacatacactggataggcatatcaataacttacaaaaaacctgcaaccattcactgacataaaatgcaaccatagtttgacatagtgaaataaaagttataacgctaaaaacaaaaaaaccagcccgagtacacctacttactgcgtgtcagagag

SEQ ID NO: 4947 - DNA, 250 bp, synthetic construct
  source 1..250: mol_type = other DNA
tgaagctcgcattacagtgcttagcttagcttgtggccaccagtcacatttcccgaaaagtgccacctgctagatgtcgctgcaaccataccttgacatacactggataggcatatcaataacttacaaaaaacctgcaaccattcactgacataaaatgcaaccataccttgacatagtgaaataaaagttataacgctaaaaacaaaaaaaccagcccgatactcgtaccttactgcgtgtcagagag

SEQ ID NO: 4948 - DNA, 250 bp, synthetic construct
  source 1..250: mol_type = other DNA
tgaagctcgcattacagtgcttagcttagcttgtggccaccagtcacatttcccgaaaagtgccacctgctagatgtcgctgcaaccataccttgacatacactggataggcatatcaataacttacaaaaaacctgcaaccattcactgacataaaataaagtcatactctgacatagtgaaataaaagttataacgctaaaaacaaaaaaaccagcccgccagtcgaaacttactgcgtgtcagagag

SEQ ID NO: 4949 - DNA, 250 bp, synthetic construct
  source 1..250: mol_type = other DNA
tgaagctcgcattacagtgcttagcttagcttgtggccaccagtcacatttcccgaaaagtgccacctgctagatgtcgctgcaaccataccttgacatacactggataggcatatcaataacttacaaaaaacctgcaaccattcactgacataaaatgcaagcaaagcgtgacatagtgaaataaaagttataacgctaaaaacaaaaaaaccagcccgcctcggggggcttactgcgtgtcagagag

SEQ ID NO: 4950 - DNA, 250 bp, synthetic construct
  source 1..250: mol_type = other DNA
tgaagctcgcattacagtgcttagcttagcttgtggccaccagtcacatttcccgaaaagtgccacctgctagatgtcgctgcaaccataccttgacatacactggataggcatatcaataacttacaaaaaacctgcaaccattcactgacataaaatgcaaccattcactgacatagtgaaataaaagttataacgctaaaaacaaaaaaaccagcccggtctgcggatcttactgcgtgtcagagag

SEQ ID NO: 4951 - DNA, 250 bp, synthetic construct
  source 1..250: mol_type = other DNA
tgaagctcgcattacagtgcttagcttagcttgtggccaccagtcacatttcccgaaaagtgccacctgctagatgtcgctgcaaccataccttgacatacactggataggcatatcaataacttacaaaaaacctgcaaccattcactgacataaaatgcaaccatacagtgacatagtgaaataaaagttataacgctaaaaacaaaaaaaccagcccgagtaatgttacttactgcgtgtcagagag

SEQ ID NO: 4952 - DNA, 250 bp, synthetic construct
  source 1..250: mol_type = other DNA
tgaagctcgcattacagtgcttagcttagcttgtggccaccagtcacatttcccgaaaagtgccacctgctagatgtcgctgcaaccataccttgacatacactggataggcatatcaataacttacaaaaaacctgcaaccatacagtgacataaaatgcaaccatagtttgacatagtgaaataaaagttataacgctaaaaacaaaaaaaccagcccggttcgggcgtcttactgcgtgtcagagag

SEQ ID NO: 4953 - DNA, 250 bp, synthetic construct
  source 1..250: mol_type = other DNA
tgaagctcgcattacagtgcttagcttagcttgtggccaccagtcacatttcccgaaaagtgccacctgctagatgtcgctgcaaccataccttgacatacactggataggcatatcaataacttacaaaaaacctgcaaccatacagtgacataaaatgcaaccataccttgacatagtgaaataaaagttataacgctaaaaacaaaaaaaccagcccgttcttatgaccttactgcgtgtcagagag

SEQ ID NO: 4954 - DNA, 250 bp, synthetic construct
  source 1..250: mol_type = other DNA
tgaagctcgcattacagtgcttagcttagcttgtggccaccagtcacatttcccgaaaagtgccacctgctagatgtcgctgcaaccataccttgacatacactggataggcatatcaataacttacaaaaaacctgcaaccatacagtgacataaaataaagtcatactctgacatagtgaaataaaagttataacgctaaaaacaaaaaaaccagcccgtttgactctccttactgcgtgtcagagag

SEQ ID NO: 4955 - DNA, 250 bp, synthetic construct
  source 1..250: mol_type = other DNA
tgaagctcgcattacagtgcttagcttagcttgtggccaccagtcacatttcccgaaaagtgccacctgctagatgtcgctgcaaccataccttgacatacactggataggcatatcaataacttacaaaaaacctgcaaccatacagtgacataaaatgcaagcaaagcgtgacatagtgaaataaaagttataacgctaaaaacaaaaaaaccagcccgtattatgtgacttactgcgtgtcagagag

SEQ ID NO: 4956 - DNA, 250 bp, synthetic construct
  source 1..250: mol_type = other DNA
tgaagctcgcattacagtgcttagcttagcttgtggccaccagtcacatttcccgaaaagtgccacctgctagatgtcgctgcaaccataccttgacatacactggataggcatatcaataacttacaaaaaacctgcaaccatacagtgacataaaatgcaaccattcactgacatagtgaaataaaagttataacgctaaaaacaaaaaaaccagcccgtacgtcaaagcttactgcgtgtcagagag

SEQ ID NO: 4957 - DNA, 250 bp, synthetic construct
  source 1..250: mol_type = other DNA
tgaagctcgcattacagtgcttagcttagcttgtggccaccagtcacatttcccgaaaagtgccacctgctagatgtcgctgcaaccataccttgacatacactggataggcatatcaataacttacaaaaaacctgcaaccatacagtgacataaaatgcaaccatacagtgacatagtgaaataaaagttataacgctaaaaacaaaaaaaccagcccgtactgaacaacttactgcgtgtcagagag

SEQ ID NO: 4958 - DNA, 250 bp, synthetic construct
  source 1..250: mol_type = other DNA
tgaagctcgcattacagtgcttagcttagcttgtggccaccagtcacatttcccgaaaagtgccacctgctagatgtcgctaaagtcatactctgacatacactggataggcatatcaataacttacaaaaaacctgcaaccatagtttgacataaaatgcaaccatagtttgacatagtgaaataaaagttataacgctaaaaacaaaaaaaccagcccgcgtagtctctcttactgcgtgtcagagag

SEQ ID NO: 4959 - DNA, 250 bp, synthetic construct
  source 1..250: mol_type = other DNA
tgaagctcgcattacagtgcttagcttagcttgtggccaccagtcacatttcccgaaaagtgccacctgctagatgtcgctaaagtcatactctgacatacactggataggcatatcaataacttacaaaaaacctgcaaccatagtttgacataaaatgcaaccataccttgacatagtgaaataaaagttataacgctaaaaacaaaaaaaccagcccgggcgctcctgcttactgcgtgtcagagag

SEQ ID NO: 4960 - DNA, 250 bp, synthetic construct
  source 1..250: mol_type = other DNA
tgaagctcgcattacagtgcttagcttagcttgtggccaccagtcacatttcccgaaaagtgccacctgctagatgtcgctaaagtcatactctgacatacactggataggcatatcaataacttacaaaaaacctgcaaccatagtttgacataaaataaagtcatactctgacatagtgaaataaaagttataacgctaaaaacaaaaaaaccagcccgtgatctagaacttactgcgtgtcagagag

SEQ ID NO: 4961 - DNA, 250 bp, synthetic construct
  source 1..250: mol_type = other DNA
tgaagctcgcattacagtgcttagcttagcttgtggccaccagtcacatttcccgaaaagtgccacctgctagatgtcgctaaagtcatactctgacatacactggataggcatatcaataacttacaaaaaacctgcaaccatagtttgacataaaatgcaagcaaagcgtgacatagtgaaataaaagttataacgctaaaaacaaaaaaaccagcccgatacatgcggcttactgcgtgtcagagag

SEQ ID NO: 4962 - DNA, 250 bp, synthetic construct
  source 1..250: mol_type = other DNA
tgaagctcgcattacagtgcttagcttagcttgtggccaccagtcacatttcccgaaaagtgccacctgctagatgtcgctaaagtcatactctgacatacactggataggcatatcaataacttacaaaaaacctgcaaccatagtttgacataaaatgcaaccattcactgacatagtgaaataaaagttataacgctaaaaacaaaaaaaccagcccggctgtccctgcttactgcgtgtcagagag

SEQ ID NO: 4963 - DNA, 250 bp, synthetic construct
  source 1..250: mol_type = other DNA
tgaagctcgcattacagtgcttagcttagcttgtggccaccagtcacatttcccgaaaagtgccacctgctagatgtcgctaaagtcatactctgacatacactggataggcatatcaataacttacaaaaaacctgcaaccatagtttgacataaaatgcaaccatacagtgacatagtgaaataaaagttataacgctaaaaacaaaaaaaccagcccgtttatgacctcttactgcgtgtcagagag

SEQ ID NO: 4964 - DNA, 250 bp, synthetic construct
  source 1..250: mol_type = other DNA
tgaagctcgcattacagtgcttagcttagcttgtggccaccagtcacatttcccgaaaagtgccacctgctagatgtcgctaaagtcatactctgacatacactggataggcatatcaataacttacaaaaaacctgcaaccataccttgacataaaatgcaaccatagtttgacatagtgaaataaaagttataacgctaaaaacaaaaaaaccagcccgtcattataagcttactgcgtgtcagagag

SEQ ID NO: 4965 - DNA, 250 bp, synthetic construct
  source 1..250: mol_type = other DNA
tgaagctcgcattacagtgcttagcttagcttgtggccaccagtcacatttcccgaaaagtgccacctgctagatgtcgctaaagtcatactctgacatacactggataggcatatcaataacttacaaaaaacctgcaaccataccttgacataaaatgcaaccataccttgacatagtgaaataaaagttataacgctaaaaacaaaaaaaccagcccgccaatcgcttcttactgcgtgtcagagag

SEQ ID NO: 4966 - DNA, 250 bp, synthetic construct
  source 1..250: mol_type = other DNA
tgaagctcgcattacagtgcttagcttagcttgtggccaccagtcacatttcccgaaaagtgccacctgctagatgtcgctaaagtcatactctgacatacactggataggcatatcaataacttacaaaaaacctgcaaccataccttgacataaaataaagtcatactctgacatagtgaaataaaagttataacgctaaaaacaaaaaaaccagcccgtcgatggaggcttactgcgtgtcagagag

SEQ ID NO: 4967 - DNA, 250 bp, synthetic construct
  source 1..250: mol_type = other DNA
tgaagctcgcattacagtgcttagcttagcttgtggccaccagtcacatttcccgaaaagtgccacctgctagatgtcgctaaagtcatactctgacatacactggataggcatatcaataacttacaaaaaacctgcaaccataccttgacataaaatgcaagcaaagcgtgacatagtgaaataaaagttataacgctaaaaacaaaaaaaccagcccgcacctgttggcttactgcgtgtcagagag

SEQ ID NO: 4968 - DNA, 250 bp, synthetic construct
  source 1..250: mol_type = other DNA
tgaagctcgcattacagtgcttagcttagcttgtggccaccagtcacatttcccgaaaagtgccacctgctagatgtcgctaaagtcatactctgacatacactggataggcatatcaataacttacaaaaaacctgcaaccataccttgacataaaatgcaaccattcactgacatagtgaaataaaagttataacgctaaaaacaaaaaaaccagcccgaggttatcggcttactgcgtgtcagagag

SEQ ID NO: 4969 - DNA, 250 bp, synthetic construct
  source 1..250: mol_type = other DNA
tgaagctcgcattacagtgcttagcttagcttgtggccaccagtcacatttcccgaaaagtgccacctgctagatgtcgctaaagtcatactctgacatacactggataggcatatcaataacttacaaaaaacctgcaaccataccttgacataaaatgcaaccatacagtgacatagtgaaataaaagttataacgctaaaaacaaaaaaaccagcccgtgaggaaacccttactgcgtgtcagagag

SEQ ID NO: 4970 - DNA, 250 bp, synthetic construct
  source 1..250: mol_type = other DNA
tgaagctcgcattacagtgcttagcttagcttgtggccaccagtcacatttcccgaaaagtgccacctgctagatgtcgctaaagtcatactctgacatacactggataggcatatcaataacttacaaaaaacctaaagtcatactctgacataaaatgcaaccatagtttgacatagtgaaataaaagttataacgctaaaaacaaaaaaaccagcccgattcacttggcttactgcgtgtcagagag

SEQ ID NO: 4971 - DNA, 250 bp, synthetic construct
  source 1..250: mol_type = other DNA
tgaagctcgcattacagtgcttagcttagcttgtggccaccagtcacatttcccgaaaagtgccacctgctagatgtcgctaaagtcatactctgacatacactggataggcatatcaataacttacaaaaaacctaaagtcatactctgacataaaatgcaaccataccttgacatagtgaaataaaagttataacgctaaaaacaaaaaaaccagcccgagggcatgcgcttactgcgtgtcagagag

SEQ ID NO: 4972 - DNA, 250 bp, synthetic construct
  source 1..250: mol_type = other DNA
tgaagctcgcattacagtgcttagcttagcttgtggccaccagtcacatttcccgaaaagtgccacctgctagatgtcgctaaagtcatactctgacatacactggataggcatatcaataacttacaaaaaacctaaagtcatactctgacataaaataaagtcatactctgacatagtgaaataaaagttataacgctaaaaacaaaaaaaccagcccggatctcgtagcttactgcgtgtcagagag

SEQ ID NO: 4973 - DNA, 250 bp, synthetic construct
  source 1..250: mol_type = other DNA
tgaagctcgcattacagtgcttagcttagcttgtggccaccagtcacatttcccgaaaagtgccacctgctagatgtcgctaaagtcatactctgacatacactggataggcatatcaataacttacaaaaaacctaaagtcatactctgacataaaatgcaagcaaagcgtgacatagtgaaataaaagttataacgctaaaaacaaaaaaaccagcccgaaggcgagaacttactgcgtgtcagagag

SEQ ID NO: 4974 - DNA, 250 bp, synthetic construct
  source 1..250: mol_type = other DNA
tgaagctcgcattacagtgcttagcttagcttgtggccaccagtcacatttcccgaaaagtgccacctgctagatgtcgctaaagtcatactctgacatacactggataggcatatcaataacttacaaaaaacctaaagtcatactctgacataaaatgcaaccattcactgacatagtgaaataaaagttataacgctaaaaacaaaaaaaccagcccggctatatcggcttactgcgtgtcagagag

SEQ ID NO: 4975 - DNA, 250 bp, synthetic construct
  source 1..250: mol_type = other DNA
tgaagctcgcattacagtgcttagcttagcttgtggccaccagtcacatttcccgaaaagtgccacctgctagatgtcgctaaagtcatactctgacatacactggataggcatatcaataacttacaaaaaacctaaagtcatactctgacataaaatgcaaccatacagtgacatagtgaaataaaagttataacgctaaaaacaaaaaaaccagcccgcccgtaaccccttactgcgtgtcagagag

SEQ ID NO: 4976 - DNA, 250 bp, synthetic construct
  source 1..250: mol_type = other DNA
tgaagctcgcattacagtgcttagcttagcttgtggccaccagtcacatttcccgaaaagtgccacctgctagatgtcgctaaagtcatactctgacatacactggataggcatatcaataacttacaaaaaacctgcaagcaaagcgtgacataaaatgcaaccatagtttgacatagtgaaataaaagttataacgctaaaaacaaaaaaaccagcccgacagtcatggcttactgcgtgtcagagag

SEQ ID NO: 4977 - DNA, 250 bp, synthetic construct
  source 1..250: mol_type = other DNA
tgaagctcgcattacagtgcttagcttagcttgtggccaccagtcacatttcccgaaaagtgccacctgctagatgtcgctaaagtcatactctgacatacactggataggcatatcaataacttacaaaaaacctgcaagcaaagcgtgacataaaatgcaaccataccttgacatagtgaaataaaagttataacgctaaaaacaaaaaaaccagcccgcagtctatctcttactgcgtgtcagagag

SEQ ID NO: 4978 - DNA, 250 bp, synthetic construct
  source 1..250: mol_type = other DNA
tgaagctcgcattacagtgcttagcttagcttgtggccaccagtcacatttcccgaaaagtgccacctgctagatgtcgctaaagtcatactctgacatacactggataggcatatcaataacttacaaaaaacctgcaagcaaagcgtgacataaaataaagtcatactctgacatagtgaaataaaagttataacgctaaaaacaaaaaaaccagcccgactccagcaacttactgcgtgtcagagag

SEQ ID NO: 4979 - DNA, 250 bp, synthetic construct
  source 1..250: mol_type = other DNA
tgaagctcgcattacagtgcttagcttagcttgtggccaccagtcacatttcccgaaaagtgccacctgctagatgtcgctaaagtcatactctgacatacactggataggcatatcaataacttacaaaaaacctgcaagcaaagcgtgacataaaatgcaagcaaagcgtgacatagtgaaataaaagttataacgctaaaaacaaaaaaaccagcccgtcataacctccttactgcgtgtcagagag

SEQ ID NO: 4980 - DNA, 250 bp, synthetic construct
  source 1..250: mol_type = other DNA
tgaagctcgcattacagtgcttagcttagcttgtggccaccagtcacatttcccgaaaagtgccacctgctagatgtcgctaaagtcatactctgacatacactggataggcatatcaataacttacaaaaaacctgcaagcaaagcgtgacataaaatgcaaccattcactgacatagtgaaataaaagttataacgctaaaaacaaaaaaaccagcccggtaagggcgccttactgcgtgtcagagag

SEQ ID NO: 4981 - DNA, 250 bp, synthetic construct
  source 1..250: mol_type = other DNA
tgaagctcgcattacagtgcttagcttagcttgtggccaccagtcacatttcccgaaaagtgccacctgctagatgtcgctaaagtcatactctgacatacactggataggcatatcaataacttacaaaaaacctgcaagcaaagcgtgacataaaatgcaaccatacagtgacatagtgaaataaaagttataacgctaaaaacaaaaaaaccagcccggaaggtatgccttactgcgtgtcagagag

SEQ ID NO: 4982 - DNA, 250 bp, synthetic construct
  source 1..250: mol_type = other DNA
tgaagctcgcattacagtgcttagcttagcttgtggccaccagtcacatttcccgaaaagtgccacctgctagatgtcgctaaagtcatactctgacatacactggataggcatatcaataacttacaaaaaacctgcaaccattcactgacataaaatgcaaccatagtttgacatagtgaaataaaagttataacgctaaaaacaaaaaaaccagcccggctaggagcgcttactgcgtgtcagagag

SEQ ID NO: 4983 - DNA, 250 bp, synthetic construct
  source 1..250: mol_type = other DNA
tgaagctcgcattacagtgcttagcttagcttgtggccaccagtcacatttcccgaaaagtgccacctgctagatgtcgctaaagtcatactctgacatacactggataggcatatcaataacttacaaaaaacctgcaaccattcactgacataaaatgcaaccataccttgacatagtgaaataaaagttataacgctaaaaacaaaaaaaccagcccgagttgccccgcttactgcgtgtcagagag

SEQ ID NO: 4984 - DNA, 250 bp, synthetic construct
  source 1..250: mol_type = other DNA
tgaagctcgcattacagtgcttagcttagcttgtggccaccagtcacatttcccgaaaagtgccacctgctagatgtcgctaaagtcatactctgacatacactggataggcatatcaataacttacaaaaaacctgcaaccattcactgacataaaataaagtcatactctgacatagtgaaataaaagttataacgctaaaaacaaaaaaaccagcccgcgtgtaaaatcttactgcgtgtcagagag

SEQ ID NO: 4985 - DNA, 250 bp, synthetic construct
  source 1..250: mol_type = other DNA
tgaagctcgcattacagtgcttagcttagcttgtggccaccagtcacatttcccgaaaagtgccacctgctagatgtcgctaaagtcatactctgacatacactggataggcatatcaataacttacaaaaaacctgcaaccattcactgacataaaatgcaagcaaagcgtgacatagtgaaataaaagttataacgctaaaaacaaaaaaaccagcccgtagtagatctcttactgcgtgtcagagag

SEQ ID NO: 4986 - DNA, 250 bp, synthetic construct
  source 1..250: mol_type = other DNA
tgaagctcgcattacagtgcttagcttagcttgtggccaccagtcacatttcccgaaaagtgccacctgctagatgtcgctaaagtcatactctgacatacactggataggcatatcaataacttacaaaaaacctgcaaccattcactgacataaaatgcaaccattcactgacatagtgaaataaaagttataacgctaaaaacaaaaaaaccagcccggctgaaggctcttactgcgtgtcagagag

SEQ ID NO: 4987 - DNA, 250 bp, synthetic construct
  source 1..250: mol_type = other DNA
tgaagctcgcattacagtgcttagcttagcttgtggccaccagtcacatttcccgaaaagtgccacctgctagatgtcgctaaagtcatactctgacatacactggataggcatatcaataacttacaaaaaacctgcaaccattcactgacataaaatgcaaccatacagtgacatagtgaaataaaagttataacgctaaaaacaaaaaaaccagcccgtacagaactccttactgcgtgtcagagag

SEQ ID NO: 4988 - DNA, 250 bp, synthetic construct
  source 1..250: mol_type = other DNA
tgaagctcgcattacagtgcttagcttagcttgtggccaccagtcacatttcccgaaaagtgccacctgctagatgtcgctaaagtcatactctgacatacactggataggcatatcaataacttacaaaaaacctgcaaccatacagtgacataaaatgcaaccatagtttgacatagtgaaataaaagttataacgctaaaaacaaaaaaaccagcccgggaacctttccttactgcgtgtcagagag

SEQ ID NO: 4989 - DNA, 250 bp, synthetic construct
  source 1..250: mol_type = other DNA
tgaagctcgcattacagtgcttagcttagcttgtggccaccagtcacatttcccgaaaagtgccacctgctagatgtcgctaaagtcatactctgacatacactggataggcatatcaataacttacaaaaaacctgcaaccatacagtgacataaaatgcaaccataccttgacatagtgaaataaaagttataacgctaaaaacaaaaaaaccagcccgagtcacgtttcttactgcgtgtcagagag

SEQ ID NO: 4990 - DNA, 250 bp, synthetic construct
  source 1..250: mol_type = other DNA
tgaagctcgcattacagtgcttagcttagcttgtggccaccagtcacatttcccgaaaagtgccacctgctagatgtcgctaaagtcatactctgacatacactggataggcatatcaataacttacaaaaaacctgcaaccatacagtgacataaaataaagtcatactctgacatagtgaaataaaagttataacgctaaaaacaaaaaaaccagcccgcgaaatgctccttactgcgtgtcagagag

SEQ ID NO: 4991 - DNA, 250 bp, synthetic construct
  source 1..250: mol_type = other DNA
tgaagctcgcattacagtgcttagcttagcttgtggccaccagtcacatttcccgaaaagtgccacctgctagatgtcgctaaagtcatactctgacatacactggataggcatatcaataacttacaaaaaacctgcaaccatacagtgacataaaatgcaagcaaagcgtgacatagtgaaataaaagttataacgctaaaaacaaaaaaaccagcccgtcgatccggacttactgcgtgtcagagag

SEQ ID NO: 4992 - DNA, 250 bp, synthetic construct
  source 1..250: mol_type = other DNA
tgaagctcgcattacagtgcttagcttagcttgtggccaccagtcacatttcccgaaaagtgccacctgctagatgtcgctaaagtcatactctgacatacactggataggcatatcaataacttacaaaaaacctgcaaccatacagtgacataaaatgcaaccattcactgacatagtgaaataaaagttataacgctaaaaacaaaaaaaccagcccgtttacttaatcttactgcgtgtcagagag

SEQ ID NO: 4993 - DNA, 250 bp, synthetic construct
  source 1..250: mol_type = other DNA
tgaagctcgcattacagtgcttagcttagcttgtggccaccagtcacatttcccgaaaagtgccacctgctagatgtcgctaaagtcatactctgacatacactggataggcatatcaataacttacaaaaaacctgcaaccatacagtgacataaaatgcaaccatacagtgacatagtgaaataaaagttataacgctaaaaacaaaaaaaccagcccgatgttccgtacttactgcgtgtcagagag

SEQ ID NO: 4994 - DNA, 250 bp, synthetic construct
  source 1..250: mol_type = other DNA
tgaagctcgcattacagtgcttagcttagcttgtggccaccagtcacatttcccgaaaagtgccacctgctagatgtcgctgcaagcaaagcgtgacatacactggataggcatatcaataacttacaaaaaacctgcaaccatagtttgacataaaatgcaaccatagtttgacatagtgaaataaaagttataacgctaaaaacaaaaaaaccagcccgaacaaaattgcttactgcgtgtcagagag

SEQ ID NO: 4995 - DNA, 250 bp, synthetic construct
  source 1..250: mol_type = other DNA
tgaagctcgcattacagtgcttagcttagcttgtggccaccagtcacatttcccgaaaagtgccacctgctagatgtcgctgcaagcaaagcgtgacatacactggataggcatatcaataacttacaaaaaacctgcaaccatagtttgacataaaatgcaaccataccttgacatagtgaaataaaagttataacgctaaaaacaaaaaaaccagcccgtgtgcgttcacttactgcgtgtcagagag

SEQ ID NO: 4996 - DNA, 250 bp, synthetic construct
  source 1..250: mol_type = other DNA
tgaagctcgcattacagtgcttagcttagcttgtggccaccagtcacatttcccgaaaagtgccacctgctagatgtcgctgcaagcaaagcgtgacatacactggataggcatatcaataacttacaaaaaacctgcaaccatagtttgacataaaataaagtcatactctgacatagtgaaataaaagttataacgctaaaaacaaaaaaaccagcccggatggattcacttactgcgtgtcagagag

SEQ ID NO: 4997 - DNA, 250 bp, synthetic construct
  source 1..250: mol_type = other DNA
tgaagctcgcattacagtgcttagcttagcttgtggccaccagtcacatttcccgaaaagtgccacctgctagatgtcgctgcaagcaaagcgtgacatacactggataggcatatcaataacttacaaaaaacctgcaaccatagtttgacataaaatgcaagcaaagcgtgacatagtgaaataaaagttataacgctaaaaacaaaaaaaccagcccgaattcgaccccttactgcgtgtcagagag

SEQ ID NO: 4998 - DNA, 250 bp, synthetic construct
  source 1..250: mol_type = other DNA
tgaagctcgcattacagtgcttagcttagcttgtggccaccagtcacatttcccgaaaagtgccacctgctagatgtcgctgcaagcaaagcgtgacatacactggataggcatatcaataacttacaaaaaacctgcaaccatagtttgacataaaatgcaaccattcactgacatagtgaaataaaagttataacgctaaaaacaaaaaaaccagcccgtattcccagacttactgcgtgtcagagag

SEQ ID NO: 4999 - DNA, 250 bp, synthetic construct
  source 1..250: mol_type = other DNA
tgaagctcgcattacagtgcttagcttagcttgtggccaccagtcacatttcccgaaaagtgccacctgctagatgtcgctgcaagcaaagcgtgacatacactggataggcatatcaataacttacaaaaaacctgcaaccatagtttgacataaaatgcaaccatacagtgacatagtgaaataaaagttataacgctaaaaacaaaaaaaccagcccgattgaagtctcttactgcgtgtcagagag

SEQ ID NO: 5000 - DNA, 250 bp, synthetic construct
  source 1..250: mol_type = other DNA
tgaagctcgcattacagtgcttagcttagcttgtggccaccagtcacatttcccgaaaagtgccacctgctagatgtcgctgcaagcaaagcgtgacatacactggataggcatatcaataacttacaaaaaacctgcaaccataccttgacataaaatgcaaccatagtttgacatagtgaaataaaagttataacgctaaaaacaaaaaaaccagcccgttagttttgccttactgcgtgtcagagag

SEQ ID NO: 5001 - DNA, 250 bp, synthetic construct
  source 1..250: mol_type = other DNA
tgaagctcgcattacagtgcttagcttagcttgtggccaccagtcacatttcccgaaaagtgccacctgctagatgtcgctgcaagcaaagcgtgacatacactggataggcatatcaataacttacaaaaaacctgcaaccataccttgacataaaatgcaaccataccttgacatagtgaaataaaagttataacgctaaaaacaaaaaaaccagcccgtcccacgctacttactgcgtgtcagagag

SEQ ID NO: 5002 - DNA, 250 bp, synthetic construct
  source 1..250: mol_type = other DNA
tgaagctcgcattacagtgcttagcttagcttgtggccaccagtcacatttcccgaaaagtgccacctgctagatgtcgctgcaagcaaagcgtgacatacactggataggcatatcaataacttacaaaaaacctgcaaccataccttgacataaaataaagtcatactctgacatagtgaaataaaagttataacgctaaaaacaaaaaaaccagcccgcaggacagcccttactgcgtgtcagagag

SEQ ID NO: 5003 - DNA, 250 bp, synthetic construct
  source 1..250: mol_type = other DNA
tgaagctcgcattacagtgcttagcttagcttgtggccaccagtcacatttcccgaaaagtgccacctgctagatgtcgctgcaagcaaagcgtgacatacactggataggcatatcaataacttacaaaaaacctgcaaccataccttgacataaaatgcaagcaaagcgtgacatagtgaaataaaagttataacgctaaaaacaaaaaaaccagcccgatacctcaaacttactgcgtgtcagagag

SEQ ID NO: 5004 - DNA, 250 bp, synthetic construct
  source 1..250: mol_type = other DNA
tgaagctcgcattacagtgcttagcttagcttgtggccaccagtcacatttcccgaaaagtgccacctgctagatgtcgctgcaagcaaagcgtgacatacactggataggcatatcaataacttacaaaaaacctgcaaccataccttgacataaaatgcaaccattcactgacatagtgaaataaaagttataacgctaaaaacaaaaaaaccagcccgtcttcggtggcttactgcgtgtcagagag

SEQ ID NO: 5005 - DNA, 250 bp, synthetic construct
  source 1..250: mol_type = other DNA
tgaagctcgcattacagtgcttagcttagcttgtggccaccagtcacatttcccgaaaagtgccacctgctagatgtcgctgcaagcaaagcgtgacatacactggataggcatatcaataacttacaaaaaacctgcaaccataccttgacataaaatgcaaccatacagtgacatagtgaaataaaagttataacgctaaaaacaaaaaaaccagcccgtacgccgtgacttactgcgtgtcagagag

SEQ ID NO: 5006 - DNA, 250 bp, synthetic construct
  source 1..250: mol_type = other DNA
tgaagctcgcattacagtgcttagcttagcttgtggccaccagtcacatttcccgaaaagtgccacctgctagatgtcgctgcaagcaaagcgtgacatacactggataggcatatcaataacttacaaaaaacctaaagtcatactctgacataaaatgcaaccatagtttgacatagtgaaataaaagttataacgctaaaaacaaaaaaaccagcccgagatcagagtcttactgcgtgtcagagag

SEQ ID NO: 5007 - DNA, 250 bp, synthetic construct
  source 1..250: mol_type = other DNA
tgaagctcgcattacagtgcttagcttagcttgtggccaccagtcacatttcccgaaaagtgccacctgctagatgtcgctgcaagcaaagcgtgacatacactggataggcatatcaataacttacaaaaaacctaaagtcatactctgacataaaatgcaaccataccttgacatagtgaaataaaagttataacgctaaaaacaaaaaaaccagcccgtatccagatacttactgcgtgtcagagag

SEQ ID NO: 5008 - DNA, 250 bp, synthetic construct
  source 1..250: mol_type = other DNA
tgaagctcgcattacagtgcttagcttagcttgtggccaccagtcacatttcccgaaaagtgccacctgctagatgtcgctgcaagcaaagcgtgacatacactggataggcatatcaataacttacaaaaaacctaaagtcatactctgacataaaataaagtcatactctgacatagtgaaataaaagttataacgctaaaaacaaaaaaaccagcccggagaatagaacttactgcgtgtcagagag

SEQ ID NO: 5009 - DNA, 250 bp, synthetic construct
  source 1..250: mol_type = other DNA
tgaagctcgcattacagtgcttagcttagcttgtggccaccagtcacatttcccgaaaagtgccacctgctagatgtcgctgcaagcaaagcgtgacatacactggataggcatatcaataacttacaaaaaacctaaagtcatactctgacataaaatgcaagcaaagcgtgacatagtgaaataaaagttataacgctaaaaacaaaaaaaccagcccgggatgtggctcttactgcgtgtcagagag

SEQ ID NO: 5010 - DNA, 250 bp, synthetic construct
  source 1..250: mol_type = other DNA
tgaagctcgcattacagtgcttagcttagcttgtggccaccagtcacatttcccgaaaagtgccacctgctagatgtcgctgcaagcaaagcgtgacatacactggataggcatatcaataacttacaaaaaacctaaagtcatactctgacataaaatgcaaccattcactgacatagtgaaataaaagttataacgctaaaaacaaaaaaaccagcccggttgttaatgcttactgcgtgtcagagag

SEQ ID NO: 5011 - DNA, 250 bp, synthetic construct
  source 1..250: mol_type = other DNA
tgaagctcgcattacagtgcttagcttagcttgtggccaccagtcacatttcccgaaaagtgccacctgctagatgtcgctgcaagcaaagcgtgacatacactggataggcatatcaataacttacaaaaaacctaaagtcatactctgacataaaatgcaaccatacagtgacatagtgaaataaaagttataacgctaaaaacaaaaaaaccagcccgaaagtaaaaccttactgcgtgtcagagag

SEQ ID NO: 5012 - DNA, 250 bp, synthetic construct
  source 1..250: mol_type = other DNA
tgaagctcgcattacagtgcttagcttagcttgtggccaccagtcacatttcccgaaaagtgccacctgctagatgtcgctgcaagcaaagcgtgacatacactggataggcatatcaataacttacaaaaaacctgcaagcaaagcgtgacataaaatgcaaccatagtttgacatagtgaaataaaagttataacgctaaaaacaaaaaaaccagcccggccgtcgaggcttactgcgtgtcagagag

SEQ ID NO: 5013 - DNA, 250 bp, synthetic construct
  source 1..250: mol_type = other DNA
tgaagctcgcattacagtgcttagcttagcttgtggccaccagtcacatttcccgaaaagtgccacctgctagatgtcgctgcaagcaaagcgtgacatacactggataggcatatcaataacttacaaaaaacctgcaagcaaagcgtgacataaaatgcaaccataccttgacatagtgaaataaaagttataacgctaaaaacaaaaaaaccagcccgacaagcctaccttactgcgtgtcagagag

SEQ ID NO: 5014 - DNA, 250 bp, synthetic construct
  source 1..250: mol_type = other DNA
tgaagctcgcattacagtgcttagcttagcttgtggccaccagtcacatttcccgaaaagtgccacctgctagatgtcgctgcaagcaaagcgtgacatacactggataggcatatcaataacttacaaaaaacctgcaagcaaagcgtgacataaaataaagtcatactctgacatagtgaaataaaagttataacgctaaaaacaaaaaaaccagcccgggggcatccccttactgcgtgtcagagag

SEQ ID NO: 5015 - DNA, 250 bp, synthetic construct
  source 1..250: mol_type = other DNA
tgaagctcgcattacagtgcttagcttagcttgtggccaccagtcacatttcccgaaaagtgccacctgctagatgtcgctgcaagcaaagcgtgacatacactggataggcatatcaataacttacaaaaaacctgcaagcaaagcgtgacataaaatgcaagcaaagcgtgacatagtgaaataaaagttataacgctaaaaacaaaaaaaccagcccggcgtctagaacttactgcgtgtcagagag

SEQ ID NO: 5016 - DNA, 250 bp, synthetic construct
  source 1..250: mol_type = other DNA
tgaagctcgcattacagtgcttagcttagcttgtggccaccagtcacatttcccgaaaagtgccacctgctagatgtcgctgcaagcaaagcgtgacatacactggataggcatatcaataacttacaaaaaacctgcaagcaaagcgtgacataaaatgcaaccattcactgacatagtgaaataaaagttataacgctaaaaacaaaaaaaccagcccgttgtgatagccttactgcgtgtcagagag

SEQ ID NO: 5017 - DNA, 250 bp, synthetic construct
  source 1..250: mol_type = other DNA
tgaagctcgcattacagtgcttagcttagcttgtggccaccagtcacatttcccgaaaagtgccacctgctagatgtcgctgcaagcaaagcgtgacatacactggataggcatatcaataacttacaaaaaacctgcaagcaaagcgtgacataaaatgcaaccatacagtgacatagtgaaataaaagttataacgctaaaaacaaaaaaaccagcccggtttcagcatcttactgcgtgtcagagag

SEQ ID NO: 5018 - DNA, 250 bp, synthetic construct
  source 1..250: mol_type = other DNA
tgaagctcgcattacagtgcttagcttagcttgtggccaccagtcacatttcccgaaaagtgccacctgctagatgtcgctgcaagcaaagcgtgacatacactggataggcatatcaataacttacaaaaaacctgcaaccattcactgacataaaatgcaaccatagtttgacatagtgaaataaaagttataacgctaaaaacaaaaaaaccagcccgagattgccaccttactgcgtgtcagagag

SEQ ID NO: 5019 - DNA, 250 bp, synthetic construct
  source 1..250: mol_type = other DNA
tgaagctcgcattacagtgcttagcttagcttgtggccaccagtcacatttcccgaaaagtgccacctgctagatgtcgctgcaagcaaagcgtgacatacactggataggcatatcaataacttacaaaaaacctgcaaccattcactgacataaaatgcaaccataccttgacatagtgaaataaaagttataacgctaaaaacaaaaaaaccagcccgtttaatgttgcttactgcgtgtcagagag

SEQ ID NO: 5020 - DNA, 250 bp, synthetic construct
  source 1..250: mol_type = other DNA
tgaagctcgcattacagtgcttagcttagcttgtggccaccagtcacatttcccgaaaagtgccacctgctagatgtcgctgcaagcaaagcgtgacatacactggataggcatatcaataacttacaaaaaacctgcaaccattcactgacataaaataaagtcatactctgacatagtgaaataaaagttataacgctaaaaacaaaaaaaccagcccgtcggagtatacttactgcgtgtcagagag

SEQ ID NO: 5021 - DNA, 250 bp, synthetic construct
  source 1..250: mol_type = other DNA
tgaagctcgcattacagtgcttagcttagcttgtggccaccagtcacatttcccgaaaagtgccacctgctagatgtcgctgcaagcaaagcgtgacatacactggataggcatatcaataacttacaaaaaacctgcaaccattcactgacataaaatgcaagcaaagcgtgacatagtgaaataaaagttataacgctaaaaacaaaaaaaccagcccgcgttttacagcttactgcgtgtcagagag

SEQ ID NO: 5022 - DNA, 250 bp, synthetic construct
  source 1..250: mol_type = other DNA
tgaagctcgcattacagtgcttagcttagcttgtggccaccagtcacatttcccgaaaagtgccacctgctagatgtcgctgcaagcaaagcgtgacatacactggataggcatatcaataacttacaaaaaacctgcaaccattcactgacataaaatgcaaccattcactgacatagtgaaataaaagttataacgctaaaaacaaaaaaaccagcccgtgtagatatgcttactgcgtgtcagagag

SEQ ID NO: 5023 - DNA, 250 bp, synthetic construct
  source 1..250: mol_type = other DNA
tgaagctcgcattacagtgcttagcttagcttgtggccaccagtcacatttcccgaaaagtgccacctgctagatgtcgctgcaagcaaagcgtgacatacactggataggcatatcaataacttacaaaaaacctgcaaccattcactgacataaaatgcaaccatacagtgacatagtgaaataaaagttataacgctaaaaacaaaaaaaccagcccgctgcattctacttactgcgtgtcagagag

SEQ ID NO: 5024 - DNA, 250 bp, synthetic construct
  source 1..250: mol_type = other DNA
tgaagctcgcattacagtgcttagcttagcttgtggccaccagtcacatttcccgaaaagtgccacctgctagatgtcgctgcaagcaaagcgtgacatacactggataggcatatcaataacttacaaaaaacctgcaaccatacagtgacataaaatgcaaccatagtttgacatagtgaaataaaagttataacgctaaaaacaaaaaaaccagcccgcaggcaggaacttactgcgtgtcagagag

SEQ ID NO: 5025 - DNA, 250 bp, synthetic construct
  source 1..250: mol_type = other DNA
tgaagctcgcattacagtgcttagcttagcttgtggccaccagtcacatttcccgaaaagtgccacctgctagatgtcgctgcaagcaaagcgtgacatacactggataggcatatcaataacttacaaaaaacctgcaaccatacagtgacataaaatgcaaccataccttgacatagtgaaataaaagttataacgctaaaaacaaaaaaaccagcccgttccctccggcttactgcgtgtcagagag

SEQ ID NO: 5026 - DNA, 250 bp, synthetic construct
  source 1..250: mol_type = other DNA
tgaagctcgcattacagtgcttagcttagcttgtggccaccagtcacatttcccgaaaagtgccacctgctagatgtcgctgcaagcaaagcgtgacatacactggataggcatatcaataacttacaaaaaacctgcaaccatacagtgacataaaataaagtcatactctgacatagtgaaataaaagttataacgctaaaaacaaaaaaaccagcccgtcgaaattaacttactgcgtgtcagagag

SEQ ID NO: 5027 - DNA, 250 bp, synthetic construct
  source 1..250: mol_type = other DNA
tgaagctcgcattacagtgcttagcttagcttgtggccaccagtcacatttcccgaaaagtgccacctgctagatgtcgctgcaagcaaagcgtgacatacactggataggcatatcaataacttacaaaaaacctgcaaccatacagtgacataaaatgcaagcaaagcgtgacatagtgaaataaaagttataacgctaaaaacaaaaaaaccagcccgacgggaaaagcttactgcgtgtcagagag

SEQ ID NO: 5028 - DNA, 250 bp, synthetic construct
  source 1..250: mol_type = other DNA
tgaagctcgcattacagtgcttagcttagcttgtggccaccagtcacatttcccgaaaagtgccacctgctagatgtcgctgcaagcaaagcgtgacatacactggataggcatatcaataacttacaaaaaacctgcaaccatacagtgacataaaatgcaaccattcactgacatagtgaaataaaagttataacgctaaaaacaaaaaaaccagcccggtaacacggtcttactgcgtgtcagagag

SEQ ID NO: 5029 - DNA, 250 bp, synthetic construct
  source 1..250: mol_type = other DNA
tgaagctcgcattacagtgcttagcttagcttgtggccaccagtcacatttcccgaaaagtgccacctgctagatgtcgctgcaagcaaagcgtgacatacactggataggcatatcaataacttacaaaaaacctgcaaccatacagtgacataaaatgcaaccatacagtgacatagtgaaataaaagttataacgctaaaaacaaaaaaaccagcccgtgccacaaatcttactgcgtgtcagagag

SEQ ID NO: 5030 - DNA, 250 bp, synthetic construct
  source 1..250: mol_type = other DNA
tgaagctcgcattacagtgcttagcttagcttgtggccaccagtcacatttcccgaaaagtgccacctgctagatgtcgctgcaaccattcactgacatacactggataggcatatcaataacttacaaaaaacctgcaaccatagtttgacataaaatgcaaccatagtttgacatagtgaaataaaagttataacgctaaaaacaaaaaaaccagcccggttcctctcacttactgcgtgtcagagag

SEQ ID NO: 5031 - DNA, 250 bp, synthetic construct
  source 1..250: mol_type = other DNA
tgaagctcgcattacagtgcttagcttagcttgtggccaccagtcacatttcccgaaaagtgccacctgctagatgtcgctgcaaccattcactgacatacactggataggcatatcaataacttacaaaaaacctgcaaccatagtttgacataaaatgcaaccataccttgacatagtgaaataaaagttataacgctaaaaacaaaaaaaccagcccgaggcgtcgtccttactgcgtgtcagagag

SEQ ID NO: 5032 - DNA, 250 bp, synthetic construct
  source 1..250: mol_type = other DNA
tgaagctcgcattacagtgcttagcttagcttgtggccaccagtcacatttcccgaaaagtgccacctgctagatgtcgctgcaaccattcactgacatacactggataggcatatcaataacttacaaaaaacctgcaaccatagtttgacataaaataaagtcatactctgacatagtgaaataaaagttataacgctaaaaacaaaaaaaccagcccgactactaattcttactgcgtgtcagagag

SEQ ID NO: 5033 - DNA, 250 bp, synthetic construct
  source 1..250: mol_type = other DNA
tgaagctcgcattacagtgcttagcttagcttgtggccaccagtcacatttcccgaaaagtgccacctgctagatgtcgctgcaaccattcactgacatacactggataggcatatcaataacttacaaaaaacctgcaaccatagtttgacataaaatgcaagcaaagcgtgacatagtgaaataaaagttataacgctaaaaacaaaaaaaccagcccgagctctcagtcttactgcgtgtcagagag

SEQ ID NO: 5034 - DNA, 250 bp, synthetic construct
  source 1..250: mol_type = other DNA
tgaagctcgcattacagtgcttagcttagcttgtggccaccagtcacatttcccgaaaagtgccacctgctagatgtcgctgcaaccattcactgacatacactggataggcatatcaataacttacaaaaaacctgcaaccatagtttgacataaaatgcaaccattcactgacatagtgaaataaaagttataacgctaaaaacaaaaaaaccagcccgaatcacttcacttactgcgtgtcagagag

SEQ ID NO: 5035 - DNA, 250 bp, synthetic construct
  source 1..250: mol_type = other DNA
tgaagctcgcattacagtgcttagcttagcttgtggccaccagtcacatttcccgaaaagtgccacctgctagatgtcgctgcaaccattcactgacatacactggataggcatatcaataacttacaaaaaacctgcaaccatagtttgacataaaatgcaaccatacagtgacatagtgaaataaaagttataacgctaaaaacaaaaaaaccagcccgcccatcatctcttactgcgtgtcagagag

SEQ ID NO: 5036 - DNA, 250 bp, synthetic construct
  source 1..250: mol_type = other DNA
tgaagctcgcattacagtgcttagcttagcttgtggccaccagtcacatttcccgaaaagtgccacctgctagatgtcgctgcaaccattcactgacatacactggataggcatatcaataacttacaaaaaacctgcaaccataccttgacataaaatgcaaccatagtttgacatagtgaaataaaagttataacgctaaaaacaaaaaaaccagcccgtagcggagtccttactgcgtgtcagagag

SEQ ID NO: 5037 - DNA, 250 bp, synthetic construct
  source 1..250: mol_type = other DNA
tgaagctcgcattacagtgcttagcttagcttgtggccaccagtcacatttcccgaaaagtgccacctgctagatgtcgctgcaaccattcactgacatacactggataggcatatcaataacttacaaaaaacctgcaaccataccttgacataaaatgcaaccataccttgacatagtgaaataaaagttataacgctaaaaacaaaaaaaccagcccggaccatttaacttactgcgtgtcagagag

SEQ ID NO: 5038 - DNA, 250 bp, synthetic construct
  source 1..250: mol_type = other DNA
tgaagctcgcattacagtgcttagcttagcttgtggccaccagtcacatttcccgaaaagtgccacctgctagatgtcgctgcaaccattcactgacatacactggataggcatatcaataacttacaaaaaacctgcaaccataccttgacataaaataaagtcatactctgacatagtgaaataaaagttataacgctaaaaacaaaaaaaccagcccgtcgcgctgaccttactgcgtgtcagagag

SEQ ID NO: 5039 - DNA, 250 bp, synthetic construct
  source 1..250: mol_type = other DNA
tgaagctcgcattacagtgcttagcttagcttgtggccaccagtcacatttcccgaaaagtgccacctgctagatgtcgctgcaaccattcactgacatacactggataggcatatcaataacttacaaaaaacctgcaaccataccttgacataaaatgcaagcaaagcgtgacatagtgaaataaaagttataacgctaaaaacaaaaaaaccagcccgttgtagcatccttactgcgtgtcagagag

SEQ ID NO: 5040 - DNA, 250 bp, synthetic construct
  source 1..250: mol_type = other DNA
tgaagctcgcattacagtgcttagcttagcttgtggccaccagtcacatttcccgaaaagtgccacctgctagatgtcgctgcaaccattcactgacatacactggataggcatatcaataacttacaaaaaacctgcaaccataccttgacataaaatgcaaccattcactgacatagtgaaataaaagttataacgctaaaaacaaaaaaaccagcccgggttaccacccttactgcgtgtcagagag

SEQ ID NO: 5041 - DNA, 250 bp, synthetic construct
  source 1..250: mol_type = other DNA
tgaagctcgcattacagtgcttagcttagcttgtggccaccagtcacatttcccgaaaagtgccacctgctagatgtcgctgcaaccattcactgacatacactggataggcatatcaataacttacaaaaaacctgcaaccataccttgacataaaatgcaaccatacagtgacatagtgaaataaaagttataacgctaaaaacaaaaaaaccagcccggggattatgacttactgcgtgtcagagag

SEQ ID NO: 5042 - DNA, 250 bp, synthetic construct
  source 1..250: mol_type = other DNA
tgaagctcgcattacagtgcttagcttagcttgtggccaccagtcacatttcccgaaaagtgccacctgctagatgtcgctgcaaccattcactgacatacactggataggcatatcaataacttacaaaaaacctaaagtcatactctgacataaaatgcaaccatagtttgacatagtgaaataaaagttataacgctaaaaacaaaaaaaccagcccgcactagaggacttactgcgtgtcagagag

SEQ ID NO: 5043 - DNA, 250 bp, synthetic construct
  source 1..250: mol_type = other DNA
tgaagctcgcattacagtgcttagcttagcttgtggccaccagtcacatttcccgaaaagtgccacctgctagatgtcgctgcaaccattcactgacatacactggataggcatatcaataacttacaaaaaacctaaagtcatactctgacataaaatgcaaccataccttgacatagtgaaataaaagttataacgctaaaaacaaaaaaaccagcccgttgggtctaacttactgcgtgtcagagag

SEQ ID NO: 5044 - DNA, 250 bp, synthetic construct
  source 1..250: mol_type = other DNA
tgaagctcgcattacagtgcttagcttagcttgtggccaccagtcacatttcccgaaaagtgccacctgctagatgtcgctgcaaccattcactgacatacactggataggcatatcaataacttacaaaaaacctaaagtcatactctgacataaaataaagtcatactctgacatagtgaaataaaagttataacgctaaaaacaaaaaaaccagcccgttttgtgtaacttactgcgtgtcagagag

SEQ ID NO: 5045 - DNA, 250 bp, synthetic construct
  source 1..250: mol_type = other DNA
tgaagctcgcattacagtgcttagcttagcttgtggccaccagtcacatttcccgaaaagtgccacctgctagatgtcgctgcaaccattcactgacatacactggataggcatatcaataacttacaaaaaacctaaagtcatactctgacataaaatgcaagcaaagcgtgacatagtgaaataaaagttataacgctaaaaacaaaaaaaccagcccgtcggcatcagcttactgcgtgtcagagag

SEQ ID NO: 5046 - DNA, 250 bp, synthetic construct
  source 1..250: mol_type = other DNA
tgaagctcgcattacagtgcttagcttagcttgtggccaccagtcacatttcccgaaaagtgccacctgctagatgtcgctgcaaccattcactgacatacactggataggcatatcaataacttacaaaaaacctaaagtcatactctgacataaaatgcaaccattcactgacatagtgaaataaaagttataacgctaaaaacaaaaaaaccagcccgccaattaaatcttactgcgtgtcagagag

SEQ ID NO: 5047 - DNA, 250 bp, synthetic construct
  source 1..250: mol_type = other DNA
tgaagctcgcattacagtgcttagcttagcttgtggccaccagtcacatttcccgaaaagtgccacctgctagatgtcgctgcaaccattcactgacatacactggataggcatatcaataacttacaaaaaacctaaagtcatactctgacataaaatgcaaccatacagtgacatagtgaaataaaagttataacgctaaaaacaaaaaaaccagcccgtcagctgtaacttactgcgtgtcagagag

SEQ ID NO: 5048 - DNA, 250 bp, synthetic construct
  source 1..250: mol_type = other DNA
tgaagctcgcattacagtgcttagcttagcttgtggccaccagtcacatttcccgaaaagtgccacctgctagatgtcgctgcaaccattcactgacatacactggataggcatatcaataacttacaaaaaacctgcaagcaaagcgtgacataaaatgcaaccatagtttgacatagtgaaataaaagttataacgctaaaaacaaaaaaaccagcccgctctttgggacttactgcgtgtcagagag

SEQ ID NO: 5049 - DNA, 250 bp, synthetic construct
  source 1..250: mol_type = other DNA
tgaagctcgcattacagtgcttagcttagcttgtggccaccagtcacatttcccgaaaagtgccacctgctagatgtcgctgcaaccattcactgacatacactggataggcatatcaataacttacaaaaaacctgcaagcaaagcgtgacataaaatgcaaccataccttgacatagtgaaataaaagttataacgctaaaaacaaaaaaaccagcccgccatctggagcttactgcgtgtcagagag

SEQ ID NO: 5050 - DNA, 250 bp, synthetic construct
  source 1..250: mol_type = other DNA
tgaagctcgcattacagtgcttagcttagcttgtggccaccagtcacatttcccgaaaagtgccacctgctagatgtcgctgcaaccattcactgacatacactggataggcatatcaataacttacaaaaaacctgcaagcaaagcgtgacataaaataaagtcatactctgacatagtgaaataaaagttataacgctaaaaacaaaaaaaccagcccgggtcttttgtcttactgcgtgtcagagag

SEQ ID NO: 5051 - DNA, 250 bp, synthetic construct
  source 1..250: mol_type = other DNA
tgaagctcgcattacagtgcttagcttagcttgtggccaccagtcacatttcccgaaaagtgccacctgctagatgtcgctgcaaccattcactgacatacactggataggcatatcaataacttacaaaaaacctgcaagcaaagcgtgacataaaatgcaagcaaagcgtgacatagtgaaataaaagttataacgctaaaaacaaaaaaaccagcccgattggcacagcttactgcgtgtcagagag

SEQ ID NO: 5052 - DNA, 250 bp, synthetic construct
  source 1..250: mol_type = other DNA
tgaagctcgcattacagtgcttagcttagcttgtggccaccagtcacatttcccgaaaagtgccacctgctagatgtcgctgcaaccattcactgacatacactggataggcatatcaataacttacaaaaaacctgcaagcaaagcgtgacataaaatgcaaccattcactgacatagtgaaataaaagttataacgctaaaaacaaaaaaaccagcccgacgggaagtacttactgcgtgtcagagag

SEQ ID NO: 5053 - DNA, 250 bp, synthetic construct
  source 1..250: mol_type = other DNA
tgaagctcgcattacagtgcttagcttagcttgtggccaccagtcacatttcccgaaaagtgccacctgctagatgtcgctgcaaccattcactgacatacactggataggcatatcaataacttacaaaaaacctgcaagcaaagcgtgacataaaatgcaaccatacagtgacatagtgaaataaaagttataacgctaaaaacaaaaaaaccagcccgtaaaaacggccttactgcgtgtcagagag

SEQ ID NO: 5054 - DNA, 250 bp, synthetic construct
  source 1..250: mol_type = other DNA
tgaagctcgcattacagtgcttagcttagcttgtggccaccagtcacatttcccgaaaagtgccacctgctagatgtcgctgcaaccattcactgacatacactggataggcatatcaataacttacaaaaaacctgcaaccattcactgacataaaatgcaaccatagtttgacatagtgaaataaaagttataacgctaaaaacaaaaaaaccagcccggacggaatcccttactgcgtgtcagagag

SEQ ID NO: 5055 - DNA, 250 bp, synthetic construct
  source 1..250: mol_type = other DNA
tgaagctcgcattacagtgcttagcttagcttgtggccaccagtcacatttcccgaaaagtgccacctgctagatgtcgctgcaaccattcactgacatacactggataggcatatcaataacttacaaaaaacctgcaaccattcactgacataaaatgcaaccataccttgacatagtgaaataaaagttataacgctaaaaacaaaaaaaccagcccgtattgcgcggcttactgcgtgtcagagag

SEQ ID NO: 5056 - DNA, 250 bp, synthetic construct
  source 1..250: mol_type = other DNA
tgaagctcgcattacagtgcttagcttagcttgtggccaccagtcacatttcccgaaaagtgccacctgctagatgtcgctgcaaccattcactgacatacactggataggcatatcaataacttacaaaaaacctgcaaccattcactgacataaaataaagtcatactctgacatagtgaaataaaagttataacgctaaaaacaaaaaaaccagcccgatccggtatacttactgcgtgtcagagag

SEQ ID NO: 5057 - DNA, 250 bp, synthetic construct
  source 1..250: mol_type = other DNA
tgaagctcgcattacagtgcttagcttagcttgtggccaccagtcacatttcccgaaaagtgccacctgctagatgtcgctgcaaccattcactgacatacactggataggcatatcaataacttacaaaaaacctgcaaccattcactgacataaaatgcaagcaaagcgtgacatagtgaaataaaagttataacgctaaaaacaaaaaaaccagcccgagaatagggacttactgcgtgtcagagag

SEQ ID NO: 5058 - DNA, 250 bp, synthetic construct
  source 1..250: mol_type = other DNA
tgaagctcgcattacagtgcttagcttagcttgtggccaccagtcacatttcccgaaaagtgccacctgctagatgtcgctgcaaccattcactgacatacactggataggcatatcaataacttacaaaaaacctgcaaccattcactgacataaaatgcaaccattcactgacatagtgaaataaaagttataacgctaaaaacaaaaaaaccagcccgctgtgaaacacttactgcgtgtcagagag

SEQ ID NO: 5059 - DNA, 250 bp, synthetic construct
  source 1..250: mol_type = other DNA
tgaagctcgcattacagtgcttagcttagcttgtggccaccagtcacatttcccgaaaagtgccacctgctagatgtcgctgcaaccattcactgacatacactggataggcatatcaataacttacaaaaaacctgcaaccattcactgacataaaatgcaaccatacagtgacatagtgaaataaaagttataacgctaaaaacaaaaaaaccagcccgccatgccgaacttactgcgtgtcagagag

SEQ ID NO: 5060 - DNA, 250 bp, synthetic construct
  source 1..250: mol_type = other DNA
tgaagctcgcattacagtgcttagcttagcttgtggccaccagtcacatttcccgaaaagtgccacctgctagatgtcgctgcaaccattcactgacatacactggataggcatatcaataacttacaaaaaacctgcaaccatacagtgacataaaatgcaaccatagtttgacatagtgaaataaaagttataacgctaaaaacaaaaaaaccagcccgtgaccgcgcacttactgcgtgtcagagag

SEQ ID NO: 5061 - DNA, 250 bp, synthetic construct
  source 1..250: mol_type = other DNA
tgaagctcgcattacagtgcttagcttagcttgtggccaccagtcacatttcccgaaaagtgccacctgctagatgtcgctgcaaccattcactgacatacactggataggcatatcaataacttacaaaaaacctgcaaccatacagtgacataaaatgcaaccataccttgacatagtgaaataaaagttataacgctaaaaacaaaaaaaccagcccggatcaattatcttactgcgtgtcagagag

SEQ ID NO: 5062 - DNA, 250 bp, synthetic construct
  source 1..250: mol_type = other DNA
tgaagctcgcattacagtgcttagcttagcttgtggccaccagtcacatttcccgaaaagtgccacctgctagatgtcgctgcaaccattcactgacatacactggataggcatatcaataacttacaaaaaacctgcaaccatacagtgacataaaataaagtcatactctgacatagtgaaataaaagttataacgctaaaaacaaaaaaaccagcccgccgaactaagcttactgcgtgtcagagag

SEQ ID NO: 5063 - DNA, 250 bp, synthetic construct
  source 1..250: mol_type = other DNA
tgaagctcgcattacagtgcttagcttagcttgtggccaccagtcacatttcccgaaaagtgccacctgctagatgtcgctgcaaccattcactgacatacactggataggcatatcaataacttacaaaaaacctgcaaccatacagtgacataaaatgcaagcaaagcgtgacatagtgaaataaaagttataacgctaaaaacaaaaaaaccagcccgatccacatgtcttactgcgtgtcagagag

SEQ ID NO: 5064 - DNA, 250 bp, synthetic construct
  source 1..250: mol_type = other DNA
tgaagctcgcattacagtgcttagcttagcttgtggccaccagtcacatttcccgaaaagtgccacctgctagatgtcgctgcaaccattcactgacatacactggataggcatatcaataacttacaaaaaacctgcaaccatacagtgacataaaatgcaaccattcactgacatagtgaaataaaagttataacgctaaaaacaaaaaaaccagcccgtggactaaaacttactgcgtgtcagagag

SEQ ID NO: 5065 - DNA, 250 bp, synthetic construct
  source 1..250: mol_type = other DNA
tgaagctcgcattacagtgcttagcttagcttgtggccaccagtcacatttcccgaaaagtgccacctgctagatgtcgctgcaaccattcactgacatacactggataggcatatcaataacttacaaaaaacctgcaaccatacagtgacataaaatgcaaccatacagtgacatagtgaaataaaagttataacgctaaaaacaaaaaaaccagcccgcaagtaacaacttactgcgtgtcagagag

SEQ ID NO: 5066 - DNA, 250 bp, synthetic construct
  source 1..250: mol_type = other DNA
tgaagctcgcattacagtgcttagcttagcttgtggccaccagtcacatttcccgaaaagtgccacctgctagatgtcgctgcaaccatacagtgacatacactggataggcatatcaataacttacaaaaaacctgcaaccatagtttgacataaaatgcaaccatagtttgacatagtgaaataaaagttataacgctaaaaacaaaaaaaccagcccggatgaaccgacttactgcgtgtcagagag

SEQ ID NO: 5067 - DNA, 250 bp, synthetic construct
  source 1..250: mol_type = other DNA
tgaagctcgcattacagtgcttagcttagcttgtggccaccagtcacatttcccgaaaagtgccacctgctagatgtcgctgcaaccatacagtgacatacactggataggcatatcaataacttacaaaaaacctgcaaccatagtttgacataaaatgcaaccataccttgacatagtgaaataaaagttataacgctaaaaacaaaaaaaccagcccgcgagtttaaccttactgcgtgtcagagag

SEQ ID NO: 5068 - DNA, 250 bp, synthetic construct
  source 1..250: mol_type = other DNA
tgaagctcgcattacagtgcttagcttagcttgtggccaccagtcacatttcccgaaaagtgccacctgctagatgtcgctgcaaccatacagtgacatacactggataggcatatcaataacttacaaaaaacctgcaaccatagtttgacataaaataaagtcatactctgacatagtgaaataaaagttataacgctaaaaacaaaaaaaccagcccgctcgccaagacttactgcgtgtcagagag

SEQ ID NO: 5069 - DNA, 250 bp, synthetic construct
  source 1..250: mol_type = other DNA
tgaagctcgcattacagtgcttagcttagcttgtggccaccagtcacatttcccgaaaagtgccacctgctagatgtcgctgcaaccatacagtgacatacactggataggcatatcaataacttacaaaaaacctgcaaccatagtttgacataaaatgcaagcaaagcgtgacatagtgaaataaaagttataacgctaaaaacaaaaaaaccagcccggacgatgggtcttactgcgtgtcagagag

SEQ ID NO: 5070 - DNA, 250 bp, synthetic construct
  source 1..250: mol_type = other DNA
tgaagctcgcattacagtgcttagcttagcttgtggccaccagtcacatttcccgaaaagtgccacctgctagatgtcgctgcaaccatacagtgacatacactggataggcatatcaataacttacaaaaaacctgcaaccatagtttgacataaaatgcaaccattcactgacatagtgaaataaaagttataacgctaaaaacaaaaaaaccagcccggcgcgtcatacttactgcgtgtcagagag

SEQ ID NO: 5071 - DNA, 250 bp, synthetic construct
  source 1..250: mol_type = other DNA
tgaagctcgcattacagtgcttagcttagcttgtggccaccagtcacatttcccgaaaagtgccacctgctagatgtcgctgcaaccatacagtgacatacactggataggcatatcaataacttacaaaaaacctgcaaccatagtttgacataaaatgcaaccatacagtgacatagtgaaataaaagttataacgctaaaaacaaaaaaaccagcccggttctgggggcttactgcgtgtcagagag

SEQ ID NO: 5072 - DNA, 250 bp, synthetic construct
  source 1..250: mol_type = other DNA
tgaagctcgcattacagtgcttagcttagcttgtggccaccagtcacatttcccgaaaagtgccacctgctagatgtcgctgcaaccatacagtgacatacactggataggcatatcaataacttacaaaaaacctgcaaccataccttgacataaaatgcaaccatagtttgacatagtgaaataaaagttataacgctaaaaacaaaaaaaccagcccgcacctctacccttactgcgtgtcagagag

SEQ ID NO: 5073 - DNA, 250 bp, synthetic construct
  source 1..250: mol_type = other DNA
tgaagctcgcattacagtgcttagcttagcttgtggccaccagtcacatttcccgaaaagtgccacctgctagatgtcgctgcaaccatacagtgacatacactggataggcatatcaataacttacaaaaaacctgcaaccataccttgacataaaatgcaaccataccttgacatagtgaaataaaagttataacgctaaaaacaaaaaaaccagcccgctgttccagccttactgcgtgtcagagag

SEQ ID NO: 5074 - DNA, 250 bp, synthetic construct
  source 1..250: mol_type = other DNA
tgaagctcgcattacagtgcttagcttagcttgtggccaccagtcacatttcccgaaaagtgccacctgctagatgtcgctgcaaccatacagtgacatacactggataggcatatcaataacttacaaaaaacctgcaaccataccttgacataaaataaagtcatactctgacatagtgaaataaaagttataacgctaaaaacaaaaaaaccagcccgggaatgctcacttactgcgtgtcagagag

SEQ ID NO: 5075 - DNA, 250 bp, synthetic construct
  source 1..250: mol_type = other DNA
tgaagctcgcattacagtgcttagcttagcttgtggccaccagtcacatttcccgaaaagtgccacctgctagatgtcgctgcaaccatacagtgacatacactggataggcatatcaataacttacaaaaaacctgcaaccataccttgacataaaatgcaagcaaagcgtgacatagtgaaataaaagttataacgctaaaaacaaaaaaaccagcccgagtatataaccttactgcgtgtcagagag

SEQ ID NO: 5076 - DNA, 250 bp, synthetic construct
  source 1..250: mol_type = other DNA
tgaagctcgcattacagtgcttagcttagcttgtggccaccagtcacatttcccgaaaagtgccacctgctagatgtcgctgcaaccatacagtgacatacactggataggcatatcaataacttacaaaaaacctgcaaccataccttgacataaaatgcaaccattcactgacatagtgaaataaaagttataacgctaaaaacaaaaaaaccagcccgtagtccggcccttactgcgtgtcagagag

SEQ ID NO: 5077 - DNA, 250 bp, synthetic construct
  source 1..250: mol_type = other DNA
tgaagctcgcattacagtgcttagcttagcttgtggccaccagtcacatttcccgaaaagtgccacctgctagatgtcgctgcaaccatacagtgacatacactggataggcatatcaataacttacaaaaaacctgcaaccataccttgacataaaatgcaaccatacagtgacatagtgaaataaaagttataacgctaaaaacaaaaaaaccagcccgattattggcccttactgcgtgtcagagag

SEQ ID NO: 5078 - DNA, 250 bp, synthetic construct
  source 1..250: mol_type = other DNA
tgaagctcgcattacagtgcttagcttagcttgtggccaccagtcacatttcccgaaaagtgccacctgctagatgtcgctgcaaccatacagtgacatacactggataggcatatcaataacttacaaaaaacctaaagtcatactctgacataaaatgcaaccatagtttgacatagtgaaataaaagttataacgctaaaaacaaaaaaaccagcccgttatggtcttcttactgcgtgtcagagag

SEQ ID NO: 5079 - DNA, 250 bp, synthetic construct
  source 1..250: mol_type = other DNA
tgaagctcgcattacagtgcttagcttagcttgtggccaccagtcacatttcccgaaaagtgccacctgctagatgtcgctgcaaccatacagtgacatacactggataggcatatcaataacttacaaaaaacctaaagtcatactctgacataaaatgcaaccataccttgacatagtgaaataaaagttataacgctaaaaacaaaaaaaccagcccgatttgaagttcttactgcgtgtcagagag

SEQ ID NO: 5080 - DNA, 250 bp, synthetic construct
  source 1..250: mol_type = other DNA
tgaagctcgcattacagtgcttagcttagcttgtggccaccagtcacatttcccgaaaagtgccacctgctagatgtcgctgcaaccatacagtgacatacactggataggcatatcaataacttacaaaaaacctaaagtcatactctgacataaaataaagtcatactctgacatagtgaaataaaagttataacgctaaaaacaaaaaaaccagcccgctaaatgattcttactgcgtgtcagagag

SEQ ID NO: 5081 - DNA, 250 bp, synthetic construct
  source 1..250: mol_type = other DNA
tgaagctcgcattacagtgcttagcttagcttgtggccaccagtcacatttcccgaaaagtgccacctgctagatgtcgctgcaaccatacagtgacatacactggataggcatatcaataacttacaaaaaacctaaagtcatactctgacataaaatgcaagcaaagcgtgacatagtgaaataaaagttataacgctaaaaacaaaaaaaccagcccgtatatggtgccttactgcgtgtcagagag

SEQ ID NO: 5082 - DNA, 250 bp, synthetic construct
  source 1..250: mol_type = other DNA
tgaagctcgcattacagtgcttagcttagcttgtggccaccagtcacatttcccgaaaagtgccacctgctagatgtcgctgcaaccatacagtgacatacactggataggcatatcaataacttacaaaaaacctaaagtcatactctgacataaaatgcaaccattcactgacatagtgaaataaaagttataacgctaaaaacaaaaaaaccagcccgcactcagaaccttactgcgtgtcagagag

SEQ ID NO: 5083 - DNA, 250 bp, synthetic construct
  source 1..250: mol_type = other DNA
tgaagctcgcattacagtgcttagcttagcttgtggccaccagtcacatttcccgaaaagtgccacctgctagatgtcgctgcaaccatacagtgacatacactggataggcatatcaataacttacaaaaaacctaaagtcatactctgacataaaatgcaaccatacagtgacatagtgaaataaaagttataacgctaaaaacaaaaaaaccagcccgtcgcaattttcttactgcgtgtcagagag

SEQ ID NO: 5084 - DNA, 250 bp, synthetic construct
  source 1..250: mol_type = other DNA
tgaagctcgcattacagtgcttagcttagcttgtggccaccagtcacatttcccgaaaagtgccacctgctagatgtcgctgcaaccatacagtgacatacactggataggcatatcaataacttacaaaaaacctgcaagcaaagcgtgacataaaatgcaaccatagtttgacatagtgaaataaaagttataacgctaaaaacaaaaaaaccagcccgagagtggcatcttactgcgtgtcagagag

SEQ ID NO: 5085 - DNA, 250 bp, synthetic construct
  source 1..250: mol_type = other DNA
tgaagctcgcattacagtgcttagcttagcttgtggccaccagtcacatttcccgaaaagtgccacctgctagatgtcgctgcaaccatacagtgacatacactggataggcatatcaataacttacaaaaaacctgcaagcaaagcgtgacataaaatgcaaccataccttgacatagtgaaataaaagttataacgctaaaaacaaaaaaaccagcccgggcaaagagccttactgcgtgtcagagag

SEQ ID NO: 5086 - DNA, 250 bp, synthetic construct
  source 1..250: mol_type = other DNA
tgaagctcgcattacagtgcttagcttagcttgtggccaccagtcacatttcccgaaaagtgccacctgctagatgtcgctgcaaccatacagtgacatacactggataggcatatcaataacttacaaaaaacctgcaagcaaagcgtgacataaaataaagtcatactctgacatagtgaaataaaagttataacgctaaaaacaaaaaaaccagcccgcgagctagatcttactgcgtgtcagagag

SEQ ID NO: 5087 - DNA, 250 bp, synthetic construct
  source 1..250: mol_type = other DNA
tgaagctcgcattacagtgcttagcttagcttgtggccaccagtcacatttcccgaaaagtgccacctgctagatgtcgctgcaaccatacagtgacatacactggataggcatatcaataacttacaaaaaacctgcaagcaaagcgtgacataaaatgcaagcaaagcgtgacatagtgaaataaaagttataacgctaaaaacaaaaaaaccagcccggttgtccggtcttactgcgtgtcagagag

SEQ ID NO: 5088 - DNA, 250 bp, synthetic construct
  source 1..250: mol_type = other DNA
tgaagctcgcattacagtgcttagcttagcttgtggccaccagtcacatttcccgaaaagtgccacctgctagatgtcgctgcaaccatacagtgacatacactggataggcatatcaataacttacaaaaaacctgcaagcaaagcgtgacataaaatgcaaccattcactgacatagtgaaataaaagttataacgctaaaaacaaaaaaaccagcccggggcacgagccttactgcgtgtcagagag

SEQ ID NO: 5089 - DNA, 250 bp, synthetic construct
  source 1..250: mol_type = other DNA
tgaagctcgcattacagtgcttagcttagcttgtggccaccagtcacatttcccgaaaagtgccacctgctagatgtcgctgcaaccatacagtgacatacactggataggcatatcaataacttacaaaaaacctgcaagcaaagcgtgacataaaatgcaaccatacagtgacatagtgaaataaaagttataacgctaaaaacaaaaaaaccagcccgcaggctcccacttactgcgtgtcagagag

SEQ ID NO: 5090 - DNA, 250 bp, synthetic construct
  source 1..250: mol_type = other DNA
tgaagctcgcattacagtgcttagcttagcttgtggccaccagtcacatttcccgaaaagtgccacctgctagatgtcgctgcaaccatacagtgacatacactggataggcatatcaataacttacaaaaaacctgcaaccattcactgacataaaatgcaaccatagtttgacatagtgaaataaaagttataacgctaaaaacaaaaaaaccagcccgaatataaggccttactgcgtgtcagagag

SEQ ID NO: 5091 - DNA, 250 bp, synthetic construct
  source 1..250: mol_type = other DNA
tgaagctcgcattacagtgcttagcttagcttgtggccaccagtcacatttcccgaaaagtgccacctgctagatgtcgctgcaaccatacagtgacatacactggataggcatatcaataacttacaaaaaacctgcaaccattcactgacataaaatgcaaccataccttgacatagtgaaataaaagttataacgctaaaaacaaaaaaaccagcccggtccgctagacttactgcgtgtcagagag

SEQ ID NO: 5092 - DNA, 250 bp, synthetic construct
  source 1..250: mol_type = other DNA
tgaagctcgcattacagtgcttagcttagcttgtggccaccagtcacatttcccgaaaagtgccacctgctagatgtcgctgcaaccatacagtgacatacactggataggcatatcaataacttacaaaaaacctgcaaccattcactgacataaaataaagtcatactctgacatagtgaaataaaagttataacgctaaaaacaaaaaaaccagcccgctttagagttcttactgcgtgtcagagag

SEQ ID NO: 5093 - DNA, 250 bp, synthetic construct
  source 1..250: mol_type = other DNA
tgaagctcgcattacagtgcttagcttagcttgtggccaccagtcacatttcccgaaaagtgccacctgctagatgtcgctgcaaccatacagtgacatacactggataggcatatcaataacttacaaaaaacctgcaaccattcactgacataaaatgcaagcaaagcgtgacatagtgaaataaaagttataacgctaaaaacaaaaaaaccagcccgatataataatcttactgcgtgtcagagag

SEQ ID NO: 5094 - DNA, 250 bp, synthetic construct
  source 1..250: mol_type = other DNA
tgaagctcgcattacagtgcttagcttagcttgtggccaccagtcacatttcccgaaaagtgccacctgctagatgtcgctgcaaccatacagtgacatacactggataggcatatcaataacttacaaaaaacctgcaaccattcactgacataaaatgcaaccattcactgacatagtgaaataaaagttataacgctaaaaacaaaaaaaccagcccgtacacaatctcttactgcgtgtcagagag

SEQ ID NO: 5095 - DNA, 250 bp, synthetic construct
  source 1..250: mol_type = other DNA
tgaagctcgcattacagtgcttagcttagcttgtggccaccagtcacatttcccgaaaagtgccacctgctagatgtcgctgcaaccatacagtgacatacactggataggcatatcaataacttacaaaaaacctgcaaccattcactgacataaaatgcaaccatacagtgacatagtgaaataaaagttataacgctaaaaacaaaaaaaccagcccggtaaaattggcttactgcgtgtcagagag

SEQ ID NO: 5096 - DNA, 250 bp, synthetic construct
  source 1..250: mol_type = other DNA
tgaagctcgcattacagtgcttagcttagcttgtggccaccagtcacatttcccgaaaagtgccacctgctagatgtcgctgcaaccatacagtgacatacactggataggcatatcaataacttacaaaaaacctgcaaccatacagtgacataaaatgcaaccatagtttgacatagtgaaataaaagttataacgctaaaaacaaaaaaaccagcccggtgaccgggacttactgcgtgtcagagag

SEQ ID NO: 5097 - DNA, 250 bp, synthetic construct
  source 1..250: mol_type = other DNA
tgaagctcgcattacagtgcttagcttagcttgtggccaccagtcacatttcccgaaaagtgccacctgctagatgtcgctgcaaccatacagtgacatacactggataggcatatcaataacttacaaaaaacctgcaaccatacagtgacataaaatgcaaccataccttgacatagtgaaataaaagttataacgctaaaaacaaaaaaaccagcccgctcggagcaccttactgcgtgtcagagag

SEQ ID NO: 5098 - DNA, 250 bp, synthetic construct
  source 1..250: mol_type = other DNA
tgaagctcgcattacagtgcttagcttagcttgtggccaccagtcacatttcccgaaaagtgccacctgctagatgtcgctgcaaccatacagtgacatacactggataggcatatcaataacttacaaaaaacctgcaaccatacagtgacataaaataaagtcatactctgacatagtgaaataaaagttataacgctaaaaacaaaaaaaccagcccggacaatgttgcttactgcgtgtcagagag

SEQ ID NO: 5099 - DNA, 250 bp, synthetic construct
  source 1..250: mol_type = other DNA
tgaagctcgcattacagtgcttagcttagcttgtggccaccagtcacatttcccgaaaagtgccacctgctagatgtcgctgcaaccatacagtgacatacactggataggcatatcaataacttacaaaaaacctgcaaccatacagtgacataaaatgcaagcaaagcgtgacatagtgaaataaaagttataacgctaaaaacaaaaaaaccagcccgaatcgagcagcttactgcgtgtcagagag

SEQ ID NO: 5100 - DNA, 250 bp, synthetic construct
  source 1..250: mol_type = other DNA
tgaagctcgcattacagtgcttagcttagcttgtggccaccagtcacatttcccgaaaagtgccacctgctagatgtcgctgcaaccatacagtgacatacactggataggcatatcaataacttacaaaaaacctgcaaccatacagtgacataaaatgcaaccattcactgacatagtgaaataaaagttataacgctaaaaacaaaaaaaccagcccgtcatggacgacttactgcgtgtcagagag

SEQ ID NO: 5101 - DNA, 250 bp, synthetic construct
  source 1..250: mol_type = other DNA
tgaagctcgcattacagtgcttagcttagcttgtggccaccagtcacatttcccgaaaagtgccacctgctagatgtcgctgcaaccatacagtgacatacactggataggcatatcaataacttacaaaaaacctgcaaccatacagtgacataaaatgcaaccatacagtgacatagtgaaataaaagttataacgctaaaaacaaaaaaaccagcccgcgccttgttacttactgcgtgtcagagag

SEQ ID NO: 5102 - DNA, 250 bp, synthetic construct
  source 1..250: mol_type = other DNA
tgaagctcgcattacagtgcttagcttagcttgtggccaccagtcacatttcccgaaaagtgccacctgctagatgtcgcgtaccaacgctgggtcacgccactggataggcatatcaataacttacaaaaaacctgcaaccattcactgacataaaatgcaaccatacagtgacatagtgaaataaaagttataacgctaaaaacaaaaaaaccagcccgtctggaacgccttactgcgtgtcagagag

SEQ ID NO: 5103 - DNA, 250 bp, synthetic construct
  source 1..250: mol_type = other DNA
tgaagctcgcattacagtgcttagcttagcttgtggccaccagtcacatttcccgaaaagtgccacctgctagatgtcgctgcaagcaaagcgtgacatacactggataggcatatcaataacttacaaaaaaccgtaccaacgctgggtcacgcaaatgcaaccatacagtgacatagtgaaataaaagttataacgctaaaaacaaaaaaaccagcccgatctcatgaacttactgcgtgtcagagag

SEQ ID NO: 5104 - DNA, 250 bp, synthetic construct
  source 1..250: mol_type = other DNA
tgaagctcgcattacagtgcttagcttagcttgtggccaccagtcacatttcccgaaaagtgccacctgctagatgtcgctgcaagcaaagcgtgacatacactggataggcatatcaataacttacaaaaaacctgcaaccattcactgacataaaagtaccaacgctgggtcacgcgtgaaataaaagttataacgctaaaaacaaaaaaaccagcccggtctgcttcgcttactgcgtgtcagagag

SEQ ID NO: 5105 - DNA, 250 bp, synthetic construct
  source 1..250: mol_type = other DNA
tgaagctcgcattacagtgcttagcttagcttgtggccaccagtcacatttcccgaaaagtgccacctgctagatgtcgctgcaagcaaagcgtgacatacactggataggcatatcaataacttacaaaaaacctgcaaccattcactgacataaaatgcaaccatacagtgacatagtgaaataaaagttataacgctaaaaacaaaaaaaccagcccgagtttcaactcttactgcgtgtcagagag

SEQ ID NO: 5106 - DNA, 250 bp, synthetic construct
  source 1..250: mol_type = other DNA
tgaagctcgcattacagtgtttataatttgattttgttgtaattacatattattaaaaaatcaattaatttcaatgtcgctgcaagcaaagcgtgacatacactggataggcatatcaataacttacaaaaaacctgcaaccattcactgacataaaatgcaaccatacagtgacatagtgaaataaaagttataacgctaaaaacaaaaaaaccagcccgggcaggatatcttactgcgtgtcagagag

SEQ ID NO: 5107 - DNA, 250 bp, synthetic construct
  source 1..250: mol_type = other DNA
tgaagctcgcattacagtgcattggatttttttaatataaatttcaattgacttacattttatttaaaatagcatgtcgctgcaagcaaagcgtgacatacactggataggcatatcaataacttacaaaaaacctgcaaccattcactgacataaaatgcaaccatacagtgacatagtgaaataaaagttataacgctaaaaacaaaaaaaccagcccggtggtacgctcttactgcgtgtcagagag

SEQ ID NO: 5108 - DNA, 250 bp, synthetic construct
  source 1..250: mol_type = other DNA
tgaagctcgcattacagtgtctatattctaataataagaaatatgtattttattcttgtaatttattagtgtgctgtcgctgcaagcaaagcgtgacatacactggataggcatatcaataacttacaaaaaacctgcaaccattcactgacataaaatgcaaccatacagtgacatagtgaaataaaagttataacgctaaaaacaaaaaaaccagcccgacagattcaacttactgcgtgtcagagag

SEQ ID NO: 5109 - DNA, 250 bp, synthetic construct
  source 1..250: mol_type = other DNA
tgaagctcgcattacagtgtatttttaaaatcatagtctgtatggtagaatgacacttataataaacttaattttgtcgctgcaagcaaagcgtgacatacactggataggcatatcaataacttacaaaaaacctgcaaccattcactgacataaaatgcaaccatacagtgacatagtgaaataaaagttataacgctaaaaacaaaaaaaccagcccgttatagattccttactgcgtgtcagagag

SEQ ID NO: 5110 - DNA, 250 bp, synthetic construct
  source 1..250: mol_type = other DNA
tgaagctcgcattacagtgcgacatgataataatcccccgtttctacttcaagagaagaaaagtattaagtaaatgtcgctgcaagcaaagcgtgacatacactggataggcatatcaataacttacaaaaaacctgcaaccattcactgacataaaatgcaaccatacagtgacatagtgaaataaaagttataacgctaaaaacaaaaaaaccagcccgatctggttagcttactgcgtgtcagagag

SEQ ID NO: 5111 - DNA, 250 bp, synthetic construct
  source 1..250: mol_type = other DNA
tgaagctcgcattacagtgcatgactgttgtcagcacaagagctaaagaagtttccaattttttatttcgtgtctgtcgctgcaagcaaagcgtgacatacactggataggcatatcaataacttacaaaaaacctgcaaccattcactgacataaaatgcaaccatacagtgacatagtgaaataaaagttataacgctaaaaacaaaaaaaccagcccgtgtcatctaccttactgcgtgtcagagag

SEQ ID NO: 5112 - DNA, 250 bp, synthetic construct
  source 1..250: mol_type = other DNA
tgaagctcgcattacagtgcgaataacatctgtctccttgcgggaaaatcaccgaccgcatttcatagatattatgtcgctgcaagcaaagcgtgacatacactggataggcatatcaataacttacaaaaaacctgcaaccattcactgacataaaatgcaaccatacagtgacatagtgaaataaaagttataacgctaaaaacaaaaaaaccagcccggtcactagcacttactgcgtgtcagagag

SEQ ID NO: 5113 - DNA, 250 bp, synthetic construct
  source 1..250: mol_type = other DNA
tgaagctcgcattacagtgagcctgggggaacagataggtctaattagcttaagagagtaaatcctgggtcctttgtcgctgcaagcaaagcgtgacatacactggataggcatatcaataacttacaaaaaacctgcaaccattcactgacataaaatgcaaccatacagtgacatagtgaaataaaagttataacgctaaaaacaaaaaaaccagcccgaagtaggcgtcttactgcgtgtcagagag

SEQ ID NO: 5114 - DNA, 250 bp, synthetic construct
  source 1..250: mol_type = other DNA
tgaagctcgcattacagtgatcattcagtagtaaccacaaacttacgctggggcttctttggcggatttaaacgtgtcgctgcaagcaaagcgtgacatacactggataggcatatcaataacttacaaaaaacctgcaaccattcactgacataaaatgcaaccatacagtgacatagtgaaataaaagttataacgctaaaaacaaaaaaaccagcccgtgcagtatcccttactgcgtgtcagagag

SEQ ID NO: 5115 - DNA, 250 bp, synthetic construct
  source 1..250: mol_type = other DNA
tgaagctcgcattacagtgttacagatactagccaggtgatttgaagtaaattagctgaggatttagcccatattgtcgctgcaagcaaagcgtgacatacactggataggcatatcaataacttacaaaaaacctgcaaccattcactgacataaaatgcaaccatacagtgacatagtgaaataaaagttataacgctaaaaacaaaaaaaccagcccgccgaagtgggcttactgcgtgtcagagag

SEQ ID NO: 5116 - DNA, 250 bp, synthetic construct
  source 1..250: mol_type = other DNA
tgaagctcgcattacagtggcgctatccggtgatctccaaattagaacataccgccccacgagggctagctcgctgtcgctgcaagcaaagcgtgacatacactggataggcatatcaataacttacaaaaaacctgcaaccattcactgacataaaatgcaaccatacagtgacatagtgaaataaaagttataacgctaaaaacaaaaaaaccagcccgatcgatccgacttactgcgtgtcagagag

SEQ ID NO: 5117 - DNA, 250 bp, synthetic construct
  source 1..250: mol_type = other DNA
tgaagctcgcattacagtgaattacctaccggcctccaccatgcctgcgctacacgcgcccaccctcccgcagttgtcgctgcaagcaaagcgtgacatacactggataggcatatcaataacttacaaaaaacctgcaaccattcactgacataaaatgcaaccatacagtgacatagtgaaataaaagttataacgctaaaaacaaaaaaaccagcccgatgacacgttcttactgcgtgtcagagag

SEQ ID NO: 5118 - DNA, 250 bp, synthetic construct
  source 1..250: mol_type = other DNA
tgaagctcgcattacagtggtttgtccgcccaggcggatgcgatgcgaccccccgccaagatatcctcaagctctgtcgctgcaagcaaagcgtgacatacactggataggcatatcaataacttacaaaaaacctgcaaccattcactgacataaaatgcaaccatacagtgacatagtgaaataaaagttataacgctaaaaacaaaaaaaccagcccggagtgtccagcttactgcgtgtcagagag

SEQ ID NO: 5119 - DNA, 250 bp, synthetic construct
  source 1..250: mol_type = other DNA
tgaagctcgcattacagtgacagcgggcttccggccagccgcaaccccccacggggcgggtcccgcggtccgagtgtcgctgcaagcaaagcgtgacatacactggataggcatatcaataacttacaaaaaacctgcaaccattcactgacataaaatgcaaccatacagtgacatagtgaaataaaagttataacgctaaaaacaaaaaaaccagcccgtgtgatcgcgcttactgcgtgtcagagag

SEQ ID NO: 5120 - DNA, 250 bp, synthetic construct
  source 1..250: mol_type = other DNA
tgaagctcgcattacagtgtcgcgggcgacagggactcgggtagggagcgcgccgtcgggggctcgcgccacgctgtcgctgcaagcaaagcgtgacatacactggataggcatatcaataacttacaaaaaacctgcaaccattcactgacataaaatgcaaccatacagtgacatagtgaaataaaagttataacgctaaaaacaaaaaaaccagcccgtatgtcgatgcttactgcgtgtcagagag

SEQ ID NO: 5121 - DNA, 250 bp, synthetic construct
  source 1..250: mol_type = other DNA
tgaagctcgcattacagtggggcgcgggctgcagcgggcccggcccgaccacggctcgagcgcctcgggcggcgtgtcgctgcaagcaaagcgtgacatacactggataggcatatcaataacttacaaaaaacctgcaaccattcactgacataaaatgcaaccatacagtgacatagtgaaataaaagttataacgctaaaaacaaaaaaaccagcccgacagaggagccttactgcgtgtcagagag

SEQ ID NO: 5122 - DNA, 250 bp, synthetic construct
  source 1..250: mol_type = other DNA
tgaagctcgcattacagtgcggcgtgcccgcctccatgcacccccgacagcccgtcgggcggcccggcccccggtgtcgctgcaagcaaagcgtgacatacactggataggcatatcaataacttacaaaaaacctgcaaccattcactgacataaaatgcaaccatacagtgacatagtgaaataaaagttataacgctaaaaacaaaaaaaccagcccgaaatccatctcttactgcgtgtcagagag

SEQ ID NO: 5123 - DNA, 250 bp, synthetic construct
  source 1..250: mol_type = other DNA
tgaagctcgcattacagtgctagatgacgctcatgaattcatgagcgtcagtcacatttcccgaaaagtgccactgtcgctgcaagcaaagcgtgacatacactggataggcatatcaataacttacaaaaaacctgcaaccattcactgacataaaatgcaaccatacagtgacatagtgaaataaaagttataacgctaaaaacaaaaaaaccagcccgggaccttgagcttactgcgtgtcagagag

SEQ ID NO: 5124 - DNA, 250 bp, synthetic construct
  source 1..250: mol_type = other DNA
tgaagctcgcattacagtgctagagtactgactcgatgacgctcatgaattcatgagcgtcacgttaaactatctgtcgctgcaagcaaagcgtgacatacactggataggcatatcaataacttacaaaaaacctgcaaccattcactgacataaaatgcaaccatacagtgacatagtgaaataaaagttataacgctaaaaacaaaaaaaccagcccgcatggagaggcttactgcgtgtcagagag

SEQ ID NO: 5125 - DNA, 250 bp, synthetic construct
  source 1..250: mol_type = other DNA
tgaagctcgcattacagtgctagagtactgactcgacgttaaactatctgacgctcatgaattcatgagcgtcatgtcgctgcaagcaaagcgtgacatacactggataggcatatcaataacttacaaaaaacctgcaaccattcactgacataaaatgcaaccatacagtgacatagtgaaataaaagttataacgctaaaaacaaaaaaaccagcccgcatgcgtggacttactgcgtgtcagagag

SEQ ID NO: 5126 - DNA, 250 bp, synthetic construct
  source 1..250: mol_type = other DNA
tgaagctcgcattacagtgctagaatattcgcgaaaatttggccaccagtcacatttcccgaaaagtgccaccttgtcgctgcaagcaaagcgtgacatacactggataggcatatcaataacttacaaaaaacctgcaaccattcactgacataaaatgcaaccatacagtgacatagtgaaataaaagttataacgctaaaaacaaaaaaaccagcccggccacaccggcttactgcgtgtcagagag

SEQ ID NO: 5127 - DNA, 250 bp, synthetic construct
  source 1..250: mol_type = other DNA
tgaagctcgcattacagtgctagatcccgaaaagtgccacctgatattcgcgaaaattcgaaaagtgccacctgtgtcgctgcaagcaaagcgtgacatacactggataggcatatcaataacttacaaaaaacctgcaaccattcactgacataaaatgcaaccatacagtgacatagtgaaataaaagttataacgctaaaaacaaaaaaaccagcccgtctgtccaatcttactgcgtgtcagagag

SEQ ID NO: 5128 - DNA, 250 bp, synthetic construct
  source 1..250: mol_type = other DNA
tgaagctcgcattacagtgctagatcccgaaaagtgccacctgcgaaaagtgccacctgatattcgcgaaaatttgtcgctgcaagcaaagcgtgacatacactggataggcatatcaataacttacaaaaaacctgcaaccattcactgacataaaatgcaaccatacagtgacatagtgaaataaaagttataacgctaaaaacaaaaaaaccagcccgaagtggacgacttactgcgtgtcagagag

SEQ ID NO: 5129 - DNA, 250 bp, synthetic construct
  source 1..250: mol_type = other DNA
tgaagctcgcattacagtgctagaatattcgcgaaaattcctgcgaaaagtgccacctgatattcgcgaaaatttgtcgctgcaagcaaagcgtgacatacactggataggcatatcaataacttacaaaaaacctgcaaccattcactgacataaaatgcaaccatacagtgacatagtgaaataaaagttataacgctaaaaacaaaaaaaccagcccgaattgatacacttactgcgtgtcagagag

SEQ ID NO: 5130 - DNA, 250 bp, synthetic construct
  source 1..250: mol_type = other DNA
tgaagctcgcattacagtgctagaatattcgcgaaaattccatattcgcgaaaattttgatattcgcgaaaatttgtcgctgcaagcaaagcgtgacatacactggataggcatatcaataacttacaaaaaacctgcaaccattcactgacataaaatgcaaccatacagtgacatagtgaaataaaagttataacgctaaaaacaaaaaaaccagcccgatgttgatggcttactgcgtgtcagagag

SEQ ID NO: 5131 - DNA, 250 bp, synthetic construct
  source 1..250: mol_type = other DNA
tgaagctcgcattacagtgctagaaattttcgcgaatattggccaccagtcacatttcccgaaaagtgccaccttgtcgctgcaagcaaagcgtgacatacactggataggcatatcaataacttacaaaaaacctgcaaccattcactgacataaaatgcaaccatacagtgacatagtgaaataaaagttataacgctaaaaacaaaaaaaccagcccgctggcgtgaccttactgcgtgtcagagag

SEQ ID NO: 5132 - DNA, 250 bp, synthetic construct
  source 1..250: mol_type = other DNA
tgaagctcgcattacagtgctagatcccgaaaagtgccacctgaattttcgcgaatatcgaaaagtgccacctgtgtcgctgcaagcaaagcgtgacatacactggataggcatatcaataacttacaaaaaacctgcaaccattcactgacataaaatgcaaccatacagtgacatagtgaaataaaagttataacgctaaaaacaaaaaaaccagcccgccgattcacccttactgcgtgtcagagag

SEQ ID NO: 5133 - DNA, 250 bp, synthetic construct
  source 1..250: mol_type = other DNA
tgaagctcgcattacagtgctagatcccgaaaagtgccacctgcgaaaagtgccacctgaattttcgcgaatattgtcgctgcaagcaaagcgtgacatacactggataggcatatcaataacttacaaaaaacctgcaaccattcactgacataaaatgcaaccatacagtgacatagtgaaataaaagttataacgctaaaaacaaaaaaaccagcccggagggcctaccttactgcgtgtcagagag

SEQ ID NO: 5134 - DNA, 250 bp, synthetic construct
  source 1..250: mol_type = other DNA
tgaagctcgcattacagtgctagaaattttcgcgaatatcctgcgaaaagtgccacctgaattttcgcgaatattgtcgctgcaagcaaagcgtgacatacactggataggcatatcaataacttacaaaaaacctgcaaccattcactgacataaaatgcaaccatacagtgacatagtgaaataaaagttataacgctaaaaacaaaaaaaccagcccgtctacgattacttactgcgtgtcagagag

SEQ ID NO: 5135 - DNA, 250 bp, synthetic construct
  source 1..250: mol_type = other DNA
tgaagctcgcattacagtgctagaaattttcgcgaatatccaattttcgcgaatatttgaattttcgcgaatattgtcgctgcaagcaaagcgtgacatacactggataggcatatcaataacttacaaaaaacctgcaaccattcactgacataaaatgcaaccatacagtgacatagtgaaataaaagttataacgctaaaaacaaaaaaaccagcccgacggtcaacgcttactgcgtgtcagagag

SEQ ID NO: 5136 - protein, 120 aa, synthetic construct
MALTKAEMSEYLFDKLGLSKRDAKELVELFFEEIRRALENGEQVKLSGFGNFDLRDKNQRPGRNPKTGEDIPITARRVVTFRPGQKLKSRVENASPKDEGSGKRTADGSEFESPKKKRKV

SEQ ID NO: 5137 - protein, 122 aa, synthetic construct
MGKRTADGSEFESPKKKRKVGSGMALTKAEMSEYLFDKLGLSKRDAKELVELFFEEIRRALENGEQVKLSGFGNFDLRDKNQRPGRNPKTGEDIPITARRVVTFRPGQKLKSRVENASPKDE

SEQ ID NO: 5138 - protein, 116 aa, synthetic construct
MGTKSELIERLATQQSHIPAKTVEDAVKEMLEHMASTLAQGERIEIRGFGSFSLHYRAPRTGRNPKTGDKVELEGKYVPHFKPGKELRDRANIYGGSGKRTADGSEFESPKKKRKV

SEQ ID NO: 5139 - protein, 118 aa, synthetic construct
MGKRTADGSEFESPKKKRKVGSGMGTKSELIERLATQQSHIPAKTVEDAVKEMLEHMASTLAQGERIEIRGFGSFSLHYRAPRTGRNPKTGDKVELEGKYVPHFKPGKELRDRANIYG

SEQ ID NO: 5140 - protein, 194 aa, synthetic construct
MGTKSELIERLATQQSHIPAKTVEDAVKEMLEHMASTLAQGGSGGLTKAEMSEYLFDKLGLSKRDAKELVELFFEEIRRALENGEQVKLSGFGNFDLRDKNQRPGRNPKTGEDIPITARRVVTFRPGQKLKSRVENAGGGERIEIRGFGSFSLHYRAPRTGRNPKTGDKVELEGKYVPHFKPGKELRDRANIYG

SEQ ID NO: 5141 - protein, 194 aa, synthetic construct; identical to SEQ ID NO: 5140

SEQ ID NO: 5142 - protein, 1075 aa, synthetic construct
MYIRNLRKPSPNKNVFKFASTKVSSVVMCESSLEFDACFHHEYNDLIESFGSQPEGFKYEFMGKSLPYTPDALISYTDKTQKYHEYKPYSKIASPLFRAEFAAKRAASLKLGIDLVLVTDRQIRVNPILNNLKLLHRYSGVYGISGIQKELLSFIHKSGVIKLNDISSQVGIPIGETRSFLFGLMHKGLVKADLGCDDLTNNPTLWATPGSGSGKRTADGSEFESPKKKRKVGSGSGGMGTKSELIERLATQQSHIPAKTVEDAVKEMLEHMASTLAQGGSGGLTKAEMSEYLFDKLGLSKRDAKELVELFFEEIRRALENGEQVKLSGFGNFDLRDKNQRPGRNPKTGEDIPITARRVVTFRPGQKLKSRVENAGGGERIEIRGFGSFSLHYRAPRTGRNPKTGDKVELEGKYVPHFKPGKELRDRANIYGSGSETPGTSESATPESGGSGSSGGSGSSGGMTDFFNEFDESLVPLKPQTPTQYVKLDDANLIQRDLDTFSDTFKNQALQRYKLISTIDKKLSRGWTQRNLDPILDELFKGGDVVRPNWRTVARWRKKYIESNGDIASLADKNHKMGNRTNRIKGDDKFFDKALERFLDAKRPTIATAYQYYKDLIVIENESIVEGKIPIISYNAFNKRIKAIPPYAVAVARHGKFKADQWFAYCAAHVPPTRILERVEIDHTPLDLILLDDELLIPIGRPYLTLLIDVFSGCVLGFHLSYKSPSYVSAAKAITHAIKPKSLDALNIELQNDWPCFGKFENLVVDNGAEFWSKNLEHACQSAGINIQYNPVRKPWLKPFIERFFGVMNEYFLPELPGKTFSNILEKEEYKPEKDAIMRFSTFVEEFHRWIADVYHQDSNSRETRIPIKRWQQGFDAYPPLTMNEEEETRFSMLMRISDSRTLTRNGFKYQELMYDSTALADYRKHYPQTKETVKKLIKVDPDDISKIYVYLEELESYLEVPCTDPTGYTDGLSIYEHKTIKKINREVIRESKDSLGLAKARMAIHERVKQEQEVFIESKTKAKITAVKKQAQIADVSNTGTSTIKVSEESAAPVQKHISNDNSDDWDDDLEAFE

SEQ ID NO: 5143 - protein, 1097 aa, synthetic construct
MYIRNLRKPSPNKNVFKFASTKVSSVVMCESSLEFDACFHHEYNDLIESFGSQPEGFKYEFMGKSLPYTPDALISYTDKTQKYHEYKPYSKIASPLFRAEFAAKRAASLKLGIDLVLVTDRQIRVNPILNNLKLLHRYSGVYGISGIQKELLSFIHKSGVIKLNDISSQVGIPIGETRSFLFGLMHKGLVKADLGCDDLTNNPTLWATPGSGSGKRTADGSEFESPKKKRKVGSSGSETPGTSESATPESSGGSSGGSSTMGTKSELIERLATQQSHIPAKTVEDAVKEMLEHMASTLAQGGSGGLTKAEMSEYLFDKLGLSKRDAKELVELFFEEIRRALENGEQVKLSGFGNFDLRDKNQRPGRNPKTGEDIPITARRVVTFRPGQKLKSRVENAGGGERIEIRGFGSFSLHYRAPRTGRNPKTGDKVELEGKYVPHFKPGKELRDRANIYGSGSETPGTSESATPESGGSGSSGGSGSSGGMTDFFNEFDESLVPLKPQTPTQYVKLDDANLIQRDLDTFSDTFKNQALQRYKLISTIDKKLSRGWTQRNLDPILDELFKGGDVVRPNWRTVARWRKKYIESNGDIASLADKNHKMGNRTNRIKGDDKFFDKALERFLDAKRPTIATAYQYYKDLIVIENESIVEGKIPIISYNAFNKRIKAIPPYAVAVARHGKFKADQWFAYCAAHVPPTRILERVEIDHTPLDLILLDDELLIPIGRPYLTLLIDVFSGCVLGFHLSYKSPSYVSAAKAITHAIKPKSLDALNIELQNDWPCFGKFENLVVDNGAEFWSKNLEHACQSAGINIQYNPVRKPWLKPFIERFFGVMNEYFLPELPGKTFSNILEKEEYKPEKDAIMRFSTFVEEFHRWIADVYHQDSNSRETRIPIKRWQQGFDAYPPLTMNEEEETRFSMLMRISDSRTLTRNGFKYQELMYDSTALADYRKHYPQTKETVKKLIKVDPDDISKIYVYLEELESYLEVPCTDPTGYTDGLSIYEHKTIKKINREVIRESKDSLGLAKARMAIHERVKQEQEVFIESKTKAKITAVKKQAQIADVSNTGTSTIKVSEESAAPVQKHISNDNSDDWDDDLEAFE

SEQ ID NO: 5144 - protein, 1125 aa, synthetic construct
MYIRNLRKPSPNKNVFKFASTKVSSVVMCESSLEFDACFHHEYNDLIESFGSQPEGFKYEFMGKSLPYTPDALISYTDKTQKYHEYKPYSKIASPLFRAEFAAKRAASLKLGIDLVLVTDRQIRVNPILNNLKLLHRYSGVYGISGIQKELLSFIHKSGVIKLNDISSQVGIPIGETRSFLFGLMHKGLVKADLGCDDLTNNPTLWATPGSGSGKRTADGSEFESPKKKRKVGSGGSGGSGGSGGSGGSGGSMGTKSELIERLATQQSHIPAKTVEDAVKEMLEHMASTLAQGGSGGLTKAEMSEYLFDKLGLSKRDAKELVELFFEEIRRALENGEQVKLSGFGNFDLRDKNQRPGRNPKTGEDIPITARRVVTFRPGQKLKSRVENAGGGERIEIRGFGSFSLHYRAPRTGRNPKTGDKVELEGKYVPHFKPGKELRDRANIYGSGGSSGGSSGSETPGTSESATPESSGSETPGTSESATPESSGSETPGTSESATPESSGGSSGGSSTMTDFFNEFDESLVPLKPQTPTQYVKLDDANLIQRDLDTFSDTFKNQALQRYKLISTIDKKLSRGWTQRNLDPILDELFKGGDVVRPNWRTVARWRKKYIESNGDIASLADKNHKMGNRTNRIKGDDKFFDKALERFLDAKRPTIATAYQYYKDLIVIENESIVEGKIPIISYNAFNKRIKAIPPYAVAVARHGKFKADQWFAYCAAHVPPTRILERVEIDHTPLDLILLDDELLIPIGRPYLTLLIDVFSGCVLGFHLSYKSPSYVSAAKAITHAIKPKSLDALNIELQNDWPCFGKFENLVVDNGAEFWSKNLEHACQSAGINIQYNPVRKPWLKPFIERFFGVMNEYFLPELPGKTFSNILEKEEYKPEKDAIMRFSTFVEEFHRWIADVYHQDSNSRETRIPIKRWQQGFDAYPPLTMNEEEETRFSMLMRISDSRTLTRNGFKYQELMYDSTALADYRKHYPQTKETVKKLIKVDPDDISKIYVYLEELESYLEVPCTDPTGYTDGLSIYEHKTIKKINREVIRESKDSLGLAKARMAIHERVKQEQEVFIESKTKAKITAVKKQAQIADVSNTGTSTIKVSEESAAPVQKHISNDNSDDWDDDLEAFE

SEQ ID NO: 5145 - protein, 1125 aa, synthetic construct
MYIRNLRKPSPNKNVFKFASTKVSSVVMCESSLEFDACFHHEYNDLIESFGSQPEGFKYEFMGKSLPYTPDALISYTDKTQKYHEYKPYSKIASPLFRAEFAAKRAASLKLGIDLVLVTDRQIRVNPILNNLKLLHRYSGVYGISGIQKELLSFIHKSGVIKLNDISSQVGIPIGETRSFLFGLMHKGLVKADLGCDDLTNNPTLWATPGSGSGKRTADGSEFESPKKKRKVGSSGGSSGGSSGSETPGTSESATPESSGSETPGTSESATPESSGSETPGTSESATPESSGGSSGGSSTMGTKSELIERLATQQSHIPAKTVEDAVKEMLEHMASTLAQGGSGGLTKAEMSEYLFDKLGLSKRDAKELVELFFEEIRRALENGEQVKLSGFGNFDLRDKNQRPGRNPKTGEDIPITARRVVTFRPGQKLKSRVENAGGGERIEIRGFGSFSLHYRAPRTGRNPKTGDKVELEGKYVPHFKPGKELRDRANIYGGGSGGSGGSGGSGGSGGSMTDFFNEFDESLVPLKPQTPTQYVKLDDANLIQRDLDTFSDTFKNQALQRYKLISTIDKKLSRGWTQRNLDPILDELFKGGDVVRPNWRTVARWRKKYIESNGDIASLADKNHKMGNRTNRIKGDDKFFDKALERFLDAKRPTIATAYQYYKDLIVIENESIVEGKIPIISYNAFNKRIKAIPPYAVAVARHGKFKADQWFAYCAAHVPPTRILERVEIDHTPLDLILLDDELLIPIGRPYLTLLIDVFSGCVLGFHLSYKSPSYVSAAKAITHAIKPKSLDALNIELQNDWPCFGKFENLVVDNGAEFWSKNLEHACQSAGINIQYNPVRKPWLKPFIERFFGVMNEYFLPELPGKTFSNILEKEEYKPEKDAIMRFSTFVEEFHRWIADVYHQDSNSRETRIPIKRWQQGFDAYPPLTMNEEEETRFSMLMRISDSRTLTRNGFKYQELMYDSTALADYRKHYPQTKETVKKLIKVDPDDISKIYVYLEELESYLEVPCTDPTGYTDGLSIYEHKTIKKINREVIRESKDSLGLAKARMAIHERVKQEQEVFIESKTKAKITAVKKQAQIADVSNTGTSTIKVSEESAAPVQKHISNDNSDDWDDDLEAFE

SEQ ID NO: 5146 - protein, 1673 aa, synthetic construct
MPKKKRKVGGSGGSMGTKSELIERLATQQSHIPAKTVEDAVKEMLEHMASTLAQGGSGGLTKAEMSEYLFDKLGLSKRDAKELVELFFEEIRRALENGEQVKLSGFGNFDLRDKNQRPGRNPKTGEDIPITARRVVTFRPGQKLKSRVENAGGGERIEIRGFGSFSLHYRAPRTGRNPKTGDKVELEGKYVPHFKPGKELRDRANIYGGGGSGGGSGTGGSGGSGGSGGSGGSGRPMDKKYSIGLAIGTNSVGWAVITDEYKVPSKKFKVLGNTDRHSIKKNLIGALLFDSGETAEATRLKRTARRRYTRRKNRICYLQEIFSNEMAKVDDSFFHRLEESFLVEEDKKHERHPIFGNIVDEVAYHEKYPTIYHLRKKLVDSTDKADLRLIYLALAHMIKFRGHFLIEGDLNPDNSDVDKLFIQLVQTYNQLFEENPINASGVDAKAILSARLSKSRRLENLIAQLPGEKKNGLFGNLIALSLGLTPNFKSNFDLAEDAKLQLSKDTYDDDLDNLLAQIGDQYADLFLAAKNLSDAILLSDILRVNTEITKAPLSASMIKRYDEHHQDLTLLKALVRQQLPEKYKEIFFDQSKNGYAGYIDGGASQEEFYKFIKPILEKMDGTEELLVKLNREDLLRKQRTFDNGSIPHQIHLGELHAILRRQEDFYPFLKDNREKIEKILTFRIPYYVGPLARGNSRFAWMTRKSEETITPWNFEEVVDKGASAQSFIERMTNFDKNLPNEKVLPKHSLLYEYFTVYNELTKVKYVTEGMRKPAFLSGEQKKAIVDLLFKTNRKVTVKQLKEDYFKKIECFDSVEISGVEDRFNASLGTYHDLLKIIKDKDFLDNEENEDILEDIVLTLTLFEDREMIEERLKTYAHLFDDKVMKQLKRRRYTGWGRLSRKLINGIRDKQSGKTILDFLKSDGFANRNFMQLIHDDSLTFKEDIQKAQVSGQGDSLHEHIANLAGSPAIKKGILQTVKVVDELVKVMGRHKPENIVIEMARENQTTQKGQKNSRERMKRIEEGIKELGSQILKEHPVENTQLQNEKLYLYYLQNGRDMYVDQELDINRLSDYDVDAIVPQSFLKDDSIDNKVLTRSDKNRGKSDNVPSEEVVKKMKNYWRQLLNAKLITQRKFDNLTKAERGGLSELDKAGFIKRQLVETRQITKHVAQILDSRMNTKYDENDKLIREVKVITLKSKLVSDFRKDFQFYKVREINNYHHAHDAYLNAVVGTALIKKYPKLESEFVYGDYKVYDVRKMIAKSEQEIGKATAKYFFYSNIMNFFKTEITLANGEIRKRPLIETNGETGEIVWDKGRDFATVRKVLSMPQVNIVKKTEVQTGGFSKESILPKRNSDKLIARKKDWDPKKYGGFDSPTVAYSVLVVAKVEKGKSKKLKSVKELLGITIMERSSFEKNPIDFLEAKGYKEVKKDLIIKLPKYSLFELENGRKRMLASAGELQKGNELALPSKYVNFLYLASHYEKLKGSPEDNEQKQLFVEQHKHYLDEIIEQISEFSKRVILADANLDKVLSAYNKHRDKPIREQAENIIHLFTLTNLGAPAAFKYFDTTIDRKRYTSTKEVLDATLIHQSITGLYETRIDLSQLGGDGGSGGSGGSGGSGGSASGGGSGGGSKRPAATKKAGQAKKKKGGSGSGATNFSLLKQAGDVEENPGPAAA

SEQ ID NO: 5147 - protein, 99 aa, Escherichia coli
MALTKAEMSEYLFDKLGLSKRDAKELVELFFEEIRRALENGEQVKLSGFGNFDLRDKNQRPGRNPKTGEDIPITARRVVTFRPGQKLKSRVENASPKDE

SEQ ID NO: 5148 - protein, 94 aa, Escherichia coli
MTKSELIERLATQQSHIPAKTVEDAVKEMLEHMASTLAQGERIEIRGFGSFSLHYRAPRTGRNPKTGDKVELEGKYVPHFKPGKELRDRANIYG

SEQ ID NO: 5149 - protein, 98 aa, Vibrio cholerae
MALTKAELAEALFEQLGMSKRDAKDTVEVFFEEIRKALESGEQVKLSGFGNFDLRDKNERPGRNPKTGEDIPITARRVVTFRPGQKLKARVENIKVEK

SEQ ID NO: 5150 - protein, 92 aa, Vibrio cholerae
MTKSELIERLCAEQTHLSAKEIEDAVKNILEHMASTLEAGERIEIRGFGSFSLHYREPRVGRNPKTGDKVELEGKYVPHFKPGKELRERVNL

SEQ ID NO: 5151 - protein, 99 aa, Pseudoalteromonas sp.
MALTKADIAEHLFEKLGINKKDAKDLVEAFFEEIRSALEKGEQVKLSGFGNFDLRDKKERPGRNPKTGEDIPISARRVVTFRPGQKLKTRVEVGTSKAK

SEQ ID NO: 5152 - protein, 95 aa, Pseudoalteromonas sp.
MTKSELIETLAEQHAHVPVKDVENAVKEILEQMAGSLSTSDRIEIRGFGSFSLHYRAPRTGRNPKTGDTVELDGKHVPHFKPGKELRDRVNESIA

SEQ ID NO: 5153 - DNA, 2769 bp, synthetic construct
  source 1..2769: mol_type = other DNA
cacatttccccgaaaagtgccacctgacgtcccatggtgaagctcgcattacagtgaatgttgttgatgcaaccataaagtgatatttaataattatttataatcagcaacttaaccacaaaacaaccatatattgatatctcacaaaacaaccataagttgatatttttgtgaatcgagtatttcagcaaaactactgcagtaagaattggtcatcacttactgcgtgtcagagaggcggccgccgaagctaagtggtttcaccaaaactggtgaaactcacccagggattggctgagacgaaaaacatattctcaataaaccctttagggaaataggccaggttttcaccgtaacacgccacatcttgcgaatatatgtgtagaaactgccggaaatcgtcgtggtattcactccagagcgatgaaaacgtttcagtttgctcatggaaaacggtgtaacaagggtgaacactatcccatatcaccagctcaccgtctttcattgccatacggaactccggatgagcattcatcaggcgggcaagaatgtgaataaaggccggataaaacttgtgcttatttttctttacggtctttaaaaaggccgtaatatccagctgaacggtctggttataggtacattgagcaactgactggcatgtttcccttgtagtgggcgcgcccatgtgtagcagagaagaccctgctagcagtgtcggtgcgaatacgggtcgtagcaatgttggtctgactatgatcagaggcaatatcaatttatgggtgtgataattatcaatttatgggtgtaattatcattttatggttgtatcaacaaatgtgagagttagctgcacatacgctcttccgcttcctcgctcactgactcgctgcgctcggtcgttcggctgcggcgagcggtatcagctcactcaaaggcggtaatacggttatccacagaatcaggggataacgcaggaaagaacatgtgagcaaaaggccagcaaaaggccaggaaccgtaaaaaggccgcgttgctggcgtttttccataggctccgcccccctgacgagcatcacaaaaatcgacgctcaagtcagaggtggcgaaacccgacaggactataaagataccaggcgtttccccctggaagctccctcgtgcgctctcctgttccgaccctgccgcttaccggatacctgtccgcctttctcccttcgggaagcgtggcgctttctcatagctcacgctgtaggtatctcagttcggtgtaggtcgttcgctccaagctgggctgtgtgcacgaaccccccgttcagcccgaccgctgcgccttatccggtaactatcgtcttgagtccaacccggtaagacacgacttatcgccactggcagcagccactggtaacaggattagcagagcgaggtatgtaggcggtgctacagagttcttgaagtggtggcctaactacggctacactagaagaacagtatttggtatctgcgctctgctgaagccagttaccttcggaaaaagagttggtagctcttgatccggcaaacaaaccaccgctggtagcggtggtttttttgtttgcaagcagcagattacgcgcagaaaaaaaggatctcaagaagatcctttgatcttttctacggggtctgacgctcagtggaacgaaaactcacgttaagggattttggtcatgagattatcaaaaaggatcttcacctagatccttttaaattaaaaatgaagttttaaatcaatctaaagtatatatgagtaaacttggtctgacagttaccaatgcttaatcagtgaggcacctatctcagcgatctgtctatttcgttcatccatagttgcctgactccccgtcgtgtagataactacgatacgggagggcttaccatctggccccagtgctgcaatgataccgcgagacccacgctcaccggctccagatttatcagcaataaaccagccagccggaagggccgagcgcagaagtggtcctgcaactttatccgcctccatccagtctattaattgttgccgggaagctagagtaagtagttcgccagttaatagtttgcgcaacgttgttgccattgctacaggcatcgtggtgtcacgctcgtcgtttggtatggcttcattcagctccggttcccaacgatcaaggcgagttacatgatcccccatgttgtgcaaaaaagcggttagctccttcggtcctccgatcgttgtcagaagtaagttggccgcagtgttatcactcatggttatggcagcactgcataattctcttactgtcatgccatccgtaagatgcttttctgtgactggtgagtactcaaccaagtcattctgagaatagtgtatgcggcgaccgagttgctcttgcccggcgtcaatacgggataataccgcgccacatagcagaactttaaaagtgctcatcattggaaaacgttcttcggggcgaaaactctcaaggatcttaccgctgttgagatccagttcgatgtaacccactcgtgcacccaactgatcttcagcatcttttactttcaccagcgtttctgggtgagcaaaaacaggaaggcaaaatgccgcaaaaaagggaataagggcgacacggaaatgttgaatactcatactcttcctttttcaatattattgaagcatttatcagggttattgtctcatgagcggatacatatttgaatgtatttagaaaaataaacaaataggggttccgcg

SEQ ID NO: 5154 - DNA, 11812 bp, synthetic construct
  source 1..11812: mol_type = other DNA
attcaccaccctgaattgactctcttccgggcgctatcatgccataccgcgaaaggttttgcgccattcgatggtgtccgggatctcgacgctctcccttatgcgactcctgcattaggaaattaatacgactcactataggggaattgtgagcggataacaattcccctgtagaaataattttgtttaactttaataaggagatataccatgggtgaactgccgagtaggtagctgataacagtacagcgcggctgaaatcatcattaaagcggtgaactgccgagtaggtagctgataacggatccgaattcgagcgaaggagatatacatatgtttttgcaaagacctaaaccttacagcgatgaaagtttagaaagtttctttatccgagtggctaacaaaaatggctacggtgatgtccatcgcttcctagaagccactaaacgattccttcaagacattgaccataatggctatcaaacctttccgactgatataactcggataaacccatactcagctaaaaacagttccagcgcacgaactgcgtcattcctgaaacttgcacaattgacatttaatgaaccgccagagctacttgggttggcaattaacagaacaaacatgaaatactcgccgtcaactagcgcggttgttagaggtgcagaagtctttcctcgcagtttactacggacgcactccatcccctgctgtcctttgtgtctgcgagaaaatggctacgcctcctacctttggcactttcaggggtacgaatactgccacagccataacgtacctttaattaccacttgtagctgtggtaaggagtttgactaccgagtatctgggttaaagggcatttgctgcaaatgcaaggagcctatcaccttaaccagcagggagaacggtcatgaggcagcgtgtactgtttcaaactggcttgctggccatgaatctaaacctctgccaaatcttcctaaaagctaccgatggggtttagttcattggtggatgggtattaaagatagcgagttcgatcacttttcgttcgttcaatttttctcaaactggccaaggtcattccactcgataatcgaagatgaagtagagttcaaccttgagcatgctgttgtcagcacgtctgaattacgactaaaagatcttcttggtcgattgtttttcggttcaattcggttacctgagcggaatcttcaacacaatatcatccttggtgagcttctctgctatttagaaaatcgtttatggcaagacaagggattaatcgccaacctcaaaatgaacgcgttagaggcgactgtaatgttaaattgtagcctcgatcagattgcatcaatggttgaacaacgcatcttgaagccaaatcgaaaaagcaagcccaacagccctcttgatgttaccgattatctatttcatttcggcgatattttctgtctttggttagctgagttccaaagcgatgagtttaaccgttcgttttatgtgtcgaggtggtaaatgcaaactctgaaagaactaatcgcatccaatcctgacgacttaacaactgaacttaagagagcatttcgtccactcacaccgcatattgcaattgatggtaatgaacttgacgcactgacgatattagtcaatttaaccgataagactgatgatcagaaagacctgctcgatcgagccaaatgcaagcaaaaacttcgagatgaaaaatggtgggctagctgcataaattgcgttaattacagacaaagccataacccaaaattcccggatatacgttctgaaggcgtgattcgaacccaagccctgggtgaattaccgagtttcctactctcgtcctcaaaaatcccaccataccattggtcatatagccatgattcaaaatacgtcaacaaaagcgcattcctcaccaatgagttttgttgggatggtgagatctcatgtttgggtgagcttcttaaagatgcagatcacccactttggaatactttgaaaaagttaggttgttctcaaaaaacttgcaaagcaatggcaaaacaactagctgatattactctcacgactatcaatgtcacactcgcaccaaattacctgactcaaatatctctccccgatagtgatacatcctacatttcactctctcctgttgcatcgctatcgatgcaaagccactttcatcagaggctccaagatgaaaatcggcatagcgcgataacgcggtttagccgaactaccaacatgggggtcactgcgatgacatgtggcggcgcatttagaatgttaaagtctggcgctaagttttccagcccccctcatcaccgattaaacagtaaacgaagttggttgacgtcagagcatgttcagtcattaaaacagtaccagcgcctcaacaaaagcctcatacctgaaaactctcggattgcactccgtagaaaatacaaaatcgagcttcaaaatatggtcagatcttggtttgcaatgcaagaccatacccttgattcgaacatacttatccaacatttgaatcatgacctatcttacttaggagccacaaaacgttttgcatacgatccagcgatgaccaagctctttactgagcttttgaaacgagagttatcaaattcaatcaataatggtgagcaacacactaatggatcgtttttagtcctaccgaatatcagggtttgtggcgcaacagctttaagctccccggtaacggtggggattccatcacttacagctttctttggcttcgttcacgcatttgaacggaatataaatcgcaccacctcatcgtttcgtgttgaatcctttgcgatatgcgtccatcaactacatgtcgagaagcgaggtttgacagcagagtttgtggaaaaaggcgacgggactatatccgctcccgcgacccgggatgactggcagtgtgatgtcgtatttagccttattttgaacaccaactttgctcaacatattgaccaagatacgttagttacatcactaccaaagcgattggctcggggttcagcaaaaattgcgattgatgactttaaacatatcaactcattctcgacattagaaacagcgatcgaatctctgccaatagaagctggtaggtggttatcactttacgcacagtcaaacaataatctaagtgatctattagcagccatgacagaggaccatcagctcatggcaagctgcgtcggttaccacttgttagaagagcccaaagataaaccaaactccctcagaggttacaaacacgctatcgccgagtgcatcattggactcattaactcaatcacctttagctcagagactgatcccaacacaatcttttggtcgctaaagaactatcaaaactacctagtggtacagccaaggagtatcaacgatgaaactaccgacaaatctagcctatgagcgctctatcgacccatcagatgtctgtttttttgtcgtctggcccgatgatagaaaaacacctttaacctacaattctcgtactctgctcgggcaaatggaagcggcatcattagcctatgatgtctcaggtcaaccaataaaaagtgccaccgctgaggcgttagctcaagggaaccctcatcaagttgatttctgccacgttccatacggtgcgagtcatattgaatgcagtttctccgtctcgttttcttctgaactacgtcaaccatataagtgtaactcaagcaaagttaaacaaacgctagtgcaattagtcgagctctacgaaacgaaaatcggctggactgagctagcaacccgatatttgatgaacatttgcaacggtaaatggctgtggaaaaatacccgtaaagcctattgctggaacattgtacttacaccttggccttggaacggggaaaaggttggatttgaagatattcgtactaactacacctcacggcaagactttaaaaataataaaaattggtctgctatagttgaaatgatcaaaaccgcattttctagtactgatgggctggcgatatttgaagtcagggccaccttgcacttgccaacgaatgctatggtgcggccaagccaagttttcacagaaaaagaaagtggcagtaaaagtaaatctaaaactcaaaacagtcgagtttttcagagtacaactattgatggtgaacgatcgccaatactaggggcctttaaaacgggagcagctattgcaaccattgacgactggtatcctgaagccactgagccactaagggtcggacggtttggggttcatcgcgaagatgtcacttgctaccgtcatccgtctaccggaaaagattttttctcgatattacaacaagcagagcactatattgaagtgttgagcgccaacaaaactcccgctcaagaaactatcaacgacatgcactttttaatggctaacctgattaagggtgggatgttccagcataaaggagactgactgtgaaatggtattataagacaatcacctttctgccagagttgtgcaacaacgagtcactggctgcaaagtgtctccgcgttctgcatggatttaactatcagtatgagacacgaaatatcggcgtttcatttccgctttggtgtgatgcaacggttggaaaaaagatttcatttgtcagcaagaacaagatagaactcgacttactacttaaacaacactatttcgtccaaatggaacaacttcaatactttcatatatccaacactgttctcgtcccagaagattgtacatacgtttcctttagacgctgtcaatctatagataagctcacagcagcagggctggcaaggaaaatcagacgcctggagaaacgtgctctatctagaggcgagcaatttgacccatcatcttttgctcaaaaagagcatactgcaatagcgcactaccactcacttggggagtccagcaaacagacgaaccgcaactttcgactcaatatcaggatgctctcggagcaaccccgtgaggggaactcgatttttagtagctatggcttatcaaattcagaaaactcgtttcagcctgtacccttaatctgacctttaataaggagatataccatggcgacaagtttacctacgccctcagcaattacgacttcggcgttagagtatgcattccatactcccgctcgcaatctaacgaaatctcgcggaaaaaacattcatcgttatgtcagtgtaaagatgagtaagaggattacggtagaatctactctagagtgtgatgcctgctatcactttgattttgagccaagtattgttcgcttttgcgctcaaccgattcgatttttatattatctcaatggtcagtctcactcctatgttcctgactttctagttcaatttgataccaacgagtttgttctatatgaagtaaagtcagcttatgctaagaacaaacctgattttgatgttgaatgggaggcgaaagtaaaagcagcaactgaactagggctagaattggagcttgttgaagagagtgatattagggatacggttgtattaaataatcttaagcgcatgcatcgttatgcttcgaaagatgagctgaataacgtacataactctctcttaaaaataataaagtacaatggcgcccaatctgcaagatgcttgggagaacagttgggtttaaaaggccgaactgttttaccaattttgtgcgatttgctgtcaaggtgtttactcgatacacgtttggataagcctctatctcttgaatctcgatttgagttggccagttatggctaagaaagggttctcaagtttccatagaaaagcagtctcttcccaagatacgcttgaatcgatagagcttgtctctagcgctaattgtctagaaagtgttacgtatcaagatatatcagcatttcccgaaacaattgcggtagagattaatttccgattaagcattcttcgctttttagcgcgaaagtgcgaaaccattgtggccaaatcaattgaaccacatcgtgtagagctacagcaaaactatagtagaaaaatacccagtgcaataacgatatatcgatggtggcttgcttttcgaaaatcagactacaaccccattagcttagcacctaatatcaaggatagaggtaatagagagacaaaagtgtcaacagttgttgattctattatggaacaggcagttgaaagagttatatctggacgaaaagtcaatgttagctctgcatataaacgtgttcgacgaaaagttcgtcaatacaatctaactcatggaacgaaatacacgtatcctaagtacgaatctgtaagaaagcgagtaaaaaagaaaaccccatttgagttattagccgcagggaaaggggagagagtagctaagagagagtttcgccgaatgggaaaaaagatcctcacgtctagcgtgctagagagggttgaaatagatcacactgtcgttgacctttttgcagtacacgaagagtatcgaatcccattgggccgaccttggcttactcaattggttgattgttacagtaaagctgtaatcggtttttatttaggtttcgagcctcctagctatgtgtcggtttcccttgcacttaagaatgcaatacaacgcaaagatgacttaatctcctcgtatgaatcgatcgagaatgaatggctatgttatggcatcccagacctactcgtaactgataatggtaaagagtttttgtcgaaagcatttgatcaagcatgtgaatcactattgatcaatgtgcatcaaaataaagttgagacgcccgacaacaaacctcatgttgaacgtaactacgggactattaatacttctctgttagacgatttacctgggaaatccttcagccagtaccttcaaagagaagggtacgactctgtgggagaagctacccttacactcaatgagattagagaaatttacttaatttggttggtggatatttatcataaaaaacccaatcagagaggcactaattgtcctaatgttgcgtggaaaaagggttgtcaagaatgggaaccagaggagttctctggttctaaagacgaattagactttaaatttgctattgttgattacaaacaacttactaaagtagggataactgtctacaaagaactgagttatagcaatgaccgtttagctgaatatagagggaagaaaggaaaccataaagttcagttcaagtataaccctgagtgtatggcagttatttgggtgttggatgaggatatgaatgagtactttacagttaatgcgattgactacgaatatgcaagtagagtatcactttggcaacataaatataacatgaaatatcaagcagaactaaattcagcagaatatgatgaggacaaggaaattgatgcagaaataaaaattgaagaaatcgcagatcgttcaattgttaagactaacaaaatcagagctcggaggcgtggcgctaggcatcaagagaatagcgcaagggctaagtcaatcagtaatgcgaacccggcctcgatacaaaaacatgaagatgaaatcgttagtgcagataatgacgattgggatattgattatgtctgagaaatcgtcaaatgagtgaaacgcgtgaggctcgtatatcaagagctaaaagggcatttgtatccacaccgagcgttaggaaaatcttgagttacatggatagatgtagagatctatcagacctagagtctgagcctacatgcatgatggtctatggtgcttcgggtgtaggtaaaacgaccgtcatcaagaaatacttaaatcaaaacagaagagagtccgaagccgggggcgatataataccggttttgcatattgagttgccagacaatgcgaagccagtagatgcagcaagggaattgctggttgaaatgggtgacccgctagcactttatgaaactgacttagctagattgacgaaaagactgactgaattaatccctgcggtcggcgtgaagctgattattatcgatgagttccaacatttggtggaagaaaggtcaaatcgggttcttacccaagtaggtaattggctaaaaatgatacttaacaaaacgaaatgtccaattgttatatttggtatgccatactcaaaagttgtactgcaagcaaactcgcaacttcacgggcgattttccattcaggttgaactgcgcccctttagctaccagggaggtagaggtgtatttaaaacttttttggaataccttgataaagccctaccttttgaaaaacaggctggcttagccaacgaaagtttgcagaaaaaattgtatgcattctctcagggaaacatgcgttcgttgagaaaccttatttatcaagcatctatcgaagcaattgataatcagcatgagacgataaccgaagaagatttcgtttttgcatcgaagttgacatcgggcgataaacccaactcatggaaaaatccttttgaggagggtgttgaggtaacagaagatatgttacgaccgccaccaaaagatattggttgggaggactatttgagacattcaaccccgagagtgagtaaaccaggtagaaataaaaactttttcgaataacctaggctgctgcgctgctgccaccgctgagcaataactagcataaccccttggggcctctaaacgggtcttgaggggttttttgctgaaacctcaggcatttgagaagcacacggtcacactgcttccggtagtcaataaaccggtaaaccagcaatagacataagcggctatttaacgaccctgccctgaaccgacgaccgggtcatcgtggccggatcttgcggcccctcggcttgaacgaattgttagacattatttgccgactaccttggtgatctcgcctttcacgtagtggacaaattcttccaactgatctgcgcgcgaggccaagcgatcttcttcttgtccaagataagcctgtctagcttcaagtatgacgggctgatactgggccggcaggcgctccattgcccagtcggcagcgacatccttcggcgcgattttgccggttactgcgctgtaccaaatgcgggacaacgtaagcactacatttcgctcatcgccagcccagtcgggcggcgagttccatagcgttaaggtttcatttagcgcctcaaatagatcctgttcaggaaccggatcaaagagttcctccgccgctggacctaccaaggcaacgctatgttctcttgcttttgtcagcaagatagccagatcaatgtcgatcgtggctggctcgaagatacctgcaagaatgtcattgcgctgccattctccaaattgcagttcgcgcttagctggataacgccacggaatgatgtcgtcgtgcacaacaatggtgacttctacagcgcggagaatctcgctctctccaggggaagccgaagtttccaaaaggtcgttgatcaaagctcgccgcgttgtttcatcaagccttacggtcaccgtaaccagcaaatcaatatcactgtgtggcttcaggccgccatccactgcggagccgtacaaatgtacggccagcaacgtcggttcgagatggcgctcgatgacgccaactacctctgatagttgagtcgatacttcggcgatcaccgcttccctcatactcttcctttttcaatattattgaagcatttatcagggttattgtctcatgagcggatacatatttgaatgtatttagaaaaataaacaaatagctagctcactcggtcgctacgctccgggcgtgagactgcggcgggcgctgcggacacatacaaagttacccacagattccgtggataagcaggggactaacatgtgaggcaaaacagcagggccgcgccggtggcgtttttccataggctccgccctcctgccagagttcacataaacagacgcttttccggtgcatctgtgggagccgtgaggctcaaccatgaatctgacagtacgggcgaaacccgacaggacttaaagatccccaccgtttccggcgggtcgctccctcttgcgctctcctgttccgaccctgccgtttaccggatacctgttccgcctttctcccttacgggaagtgtggcgctttctcatagctcacacactggtatctcggctcggtgtaggtcgttcgctccaagctgggctgtaagcaagaactccccgttcagcccgactgctgcgccttatccggtaactgttcacttgagtccaacccggaaaagcacggtaaaacgccactggcagcagccattggtaactgggagttcgcagaggatttgtttagctaaacacgcggttgctcttgaagtgtgcgccaaagtccggctacactggaaggacagatttggttgctgtgctctgcgaaagccagttaccacggttaagcagttccccaactgacttaaccttcgatcaaaccacctccccaggtggttttttcgtttacagggcaaaagattacgcgcagaaaaaaaggatctcaagaagatcctttgatcttttctactgaaccgctctagatttcagtgcaatttatctcttcaaatgtagcacctgaagtcagccccatacgatataagttgtaattctcatgttagtcatgccccgcgcccaccggaaggagctgactgggttgaaggctctcaagggcatcggtcgagatcccggtgcctaatgagtgagctaacttacattaattgcgttgcgctcactgcccgctttccagtcgggaaacctgtcgtgccagctgcattaatgaatcggccaacgcgcggggagaggcggtttgcgtattgggcgccagggtggtttttcttttcaccagtgagacgggcaacagctgattgcccttcaccgcctggccctgagagagttgcagcaagcggtccacgctggtttgccccagcaggcgaaaatcctgtttgatggtggttaacggcgggatataacatgagctgtcttcggtatcgtcgtatcccactaccgagatgtccgcaccaacgcgcagcccggactcggtaatggcgcgcattgcgcccagcgccatctgatcgttggcaaccagcatcgcagtgggaacgatgccctcattcagcatttgcatggtttgttgaaaaccggacatggcactccagtcgccttcccgttccgctatcggctgaatttgattgcgagtgagatatttatgccagccagccagacgcagacgcgccgagacagaacttaatgggcccgctaacagcgcgatttgctggtgacccaatgcgaccagatgctccacgcccagtcgcgtaccgtcttcatgggagaaaataatactgttgatgggtgtctggtcagagacatcaagaaataacgccggaacattagtgcaggcagcttccacagcaatggcatcctggtcatccagcggatagttaatgatcagcccactgacgcgttgcgcgagaagattgtgcaccgccgctttacaggcttcgacgccgcttcgttctaccatcgacaccaccacgctggcacccagttgatcggcgcgagatttaatcgccgcgacaatttgcgacggcgcgtgcagggccagactggaggtggcaacgccaatcagcaacgactgtttgcccgccagttgttgtgccacgcggttgggaatgtaattcagctccgccatcgccgcttccactttttcccgcgttttcgcagaaacgtggctggcctggttcaccacgcgggaaacggtctgataagagacaccggcatactctgcgacatcgtataacgttactggtttcac

SEQ ID NO: 5155 - DNA, 2860 bp, synthetic construct
  source 1..2860: mol_type = other DNA
ctgtcagaccaagtttactcatatatactttagattgatttaaaacttcatttttaatttaaaaggatctaggtgaagatcctttttgataatctcatgaccaaaatcccttaacgtgagttttcgttccactgagcgtcagaccccgtagaaaagatcaaaggatcttcttgagatcctttttttctgcgcgtaatctgctgcttgcaaacaaaaaaaccaccgctaccagcggtggtttgtttgccggatcaagagctaccaactctttttccgaaggtaactggcttcagcagagcgcagataccaaatactgttcttctagtgtagccgtagttaggccaccacttcaagaactctgtagcaccgcctacatacctcgctctgctaatcctgttaccagtggctgctgccagtggcgataagtcgtgtcttaccgggttggactcaagacgatagttaccggataaggcgcagcggtcgggctgaacggggggttcgtgcacacagcccagcttggagcgaacgacctacaccgaactgagatacctacagcgtgagctatgagaaagcgccacgcttcccgaagggagaaaggcggacaggtatccggtaagcggcagggtcggaacaggagagcgcacgagggagcttccagggggaaacgcctggtatctttatagtcctgtcgggtttcgccacctctgacttgagcgtcgatttttgtgatgctcgtcaggggggcggagcctatggaaaaacgccagcaacgcggcctttttacggttcctggccttttgctggccttttgctcacatgttctttcctgcgttatcccctgattctgtggataaccgtattaccgcctttgagtgagctgataccaccggtcaagctttgttgatacaaccataaaatgataattacacccataaattgataattatcacacccaaggaggtaaataatggagaaaaaaatcactggatataccaccgttgatatatcccaatggcatcgtaaagaacattttgaggcatttcagtcagttgctcaatgtacctataaccagaccgttcagctggatattacggcctttttaaagaccgtaaagaaaaataagcacaagttttatccggcctttattcacattcttgcccgcctgatgaatgctcatccggagttccgtatggcaatgaaagacggtgagctggtgatatgggatagtgttcacccttgttacaccgttttccatgagcaaactgaaacgttttcatcgctctggagtgaataccacgacgatttccggcagtttctacacatatattcgcaagatgtggcgtgttacggtgaaaacctggcctatttccctaaagggtttattgagaatatgtttttcgtctcagccaatccctgggtgagtttcaccagttttgatttaaacgtggccaatatggacaacttcttcgcccccgttttcactatgggcaaatattatacgcaaggcgacaaggtgctgatgccgctggcgattcaggttcatcatgccgtttgtgatggcttccatgtcggcagaatgcttaatgaattacaacagtactgcgatgagtggcagggcggggcgtaatttttttaaggcagttattggtgcccttctagagtccttactgcagtagttttgctgaaatactcgattcacaaaaatatcaacttatggttgttttgtgagatatcaatatatggttgttttgtggttaagttgctgattataaataattattaaatatcactttatggttgcatcaacaggtacccctaggtccaagctcgttccgttattaggattaagctggaagagccttagacgtcaggtggcacttttcggggaaatgtgcgcggaacccctatttgtttatttttctaaatacattcaaatatgtatccgctcatgagacaataaccctgataaatgcttcaataatattgaaaaaggaagagtatgagtattcaacatttccgtgtcgcccttattcccttttttgcggcattttgccttcctgtttttgctcacccagaaacgctggtgaaagtaaaagatgctgaagatcagttgggtgcacgagtgggttacatcgaactggatctcaacagcggtaagatccttgagagttttcgccccgaagaacgttttccaatgatgagcacttttaaagttctgctatgtggcgcggtattatcccgtattgacgccgggcaagagcaactcggtcgccgcatacactattctcagaatgacttggttgagtactcaccagtcacagaaaagcatcttacggatggcatgacagtaagagaattatgcagtgctgccataaccatgagtgataacactgcggccaacttacttctgacaacgatcggaggaccgaaggagctaaccgcttttttgcacaacatgggggatcatgtaactcgccttgatcgttgggaaccggagctgaatgaagccataccaaacgacgagcgtgacaccacgatgcctgtagcaatggcaacaacgttgcgcaaactattaactggcgaactacttactctagcttcccggcaacaattaatagactggatggaggcggataaagttgcaggaccacttctgcgctcggcccttccggctggctggtttattgctgataaatctggagccggtgagcgtgggtctcgcggtatcattgcagcactggggccagatggtaagccctcccgtatcgtagttatctacacgacggggagtcaggcaactatggatgaacgaaatagacagatcgctgagataggtgcctcactgattaagcattggtaa

SEQ ID NO: 5156 - DNA, 11812 bp, synthetic construct; identical to SEQ ID NO: 5154
  source 1..11812: mol_type = other DNA

SEQ ID NO: 5157 - DNA, 11812 bp, synthetic construct
  source 1..11812: mol_type = other DNA
ttttctactgaaccgctctagatttcagtgcaatttatctcttcaaatgtagcacctgaagtcagccccatacgatataagttgtaattctcatgttagtcatgccccgcgcccaccggaaggagctgactgggttgaaggctctcaagggcatcggtcgagatcccggtgcctaatgagtgagctaacttacattaattgcgttgcgctcactgcccgctttccagtcgggaaacctgtcgtgccagctgcattaatgaatcggccaacgcgcggggagaggcggtttgcgtattgggcgccagggtggtttttcttttcaccagtgagacgggcaacagctgattgcccttcaccgcctggccctgagagagttgcagcaagcggtccacgctggtttgccccagcaggcgaaaatcctgtttgatggtggttaacggcgggatataacatgagctgtcttcggtatcgtcgtatcccactaccgagatgtccgcaccaacgcgcagcccggactcggtaatggcgcgcattgcgcccagcgccatctgatcgttggcaaccagcatcgcagtgggaacgatgccctcattcagcatttgcatggtttgttgaaaaccggacatggcactccagtcgccttcccgttccgctatcggctgaatttgattgcgagtgagatatttatgccagccagccagacgcagacgcgccgagacagaacttaatgggcccgctaacagcgcgatttgctggtgacccaatgcgaccagatgctccacgcccagtcgcgtaccgtcttcatgggagaaaataatactgttgatgggtgtctggtcagagacatcaagaaataacgccggaacattagtgcaggcagcttccacagcaatggcatcctggtcatccagcggatagttaatgatcagcccactgacgcgttgcgcgagaagattgtgcaccgccgctttacaggcttcgacgccgcttcgttctaccatcgacaccaccacgctggcacccagttgatcggcgcgagatttaatcgccgcgacaatttgcgacggcgcgtgcagggccagactggaggtggcaacgccaatcagcaacgactgtttgcccgccagttgttgtgccacgcggttgggaatgtaattcagctccgccatcgccgcttccactttttcccgcgttttcgcagaaacgtggctggcctggttcaccacgcgggaaacggtctgataagagacaccggcatactctgcgacatcgtataacgttactggtttcacattcaccaccctgaattgactctcttccgggcgctatcatgccataccgcgaaaggttttgcgccattcgatggtgtccgggatctcgacgctctcccttatgcgactcctgcattaggaaattaatacgactcactataggggaattgtgagcggataacaattcccctgtagaaataattttgtttaactttaataaggagatataccatgggtgaactgccgagtaggtagctgataacagcggtgcacgggtgaactgatcgcgcagcgggtgaactgccgagtaggtagctgataacggatccgaattcgagcgaaggagatatacatatgtttttgcaaagacctaaaccttacagcgatgaaagtttagaaagtttctttatccgagtggctaacaaaaatggctacggtgatgtccatcgcttcctagaagccactaaacgattccttcaagacattgaccataatggctatcaaacctttccgactgatataactcggataaacccatactcagctaaaaacagttccagcgcacgaactgcgtcattcctgaaacttgcacaattgacatttaatgaaccgccagagctacttgggttggcaattaacagaacaaacatgaaatactcgccgtcaactagcgcggttgttagaggtgcagaagtctttcctcgcagtttactacggacgcactccatcccctgctgtcctttgtgtctgcgagaaaatggctacgcctcctacctttggcactttcaggggtacgaatactgccacagccataacgtacctttaattaccacttgtagctgtggtaaggagtttgactaccgagtatctgggttaaagggcatttgctgcaaatgcaaggagcctatcaccttaaccagcagggagaacggtcatgaggcagcgtgtactgtttcaaactggcttgctggccatgaatctaaacctctgccaaatcttcctaaaagctaccgatggggtttagttcattggtggatgggtattaaagatagcgagttcgatcacttttcgttcgttcaatttttctcaaactggccaaggtcattccactcgataatcgaagatgaagtagagttcaaccttgagcatgctgttgtcagcacgtctgaattacgactaaaagatcttcttggtcgattgtttttcggttcaattcggttacctgagcggaatcttcaacacaatatcatccttggtgagcttctctgctatttagaaaatcgtttatggcaagacaagggattaatcgccaacctcaaaatgaacgcgttagaggcgactgtaatgttaaattgtagcctcgatcagattgcatcaatggttgaacaacgcatcttgaagccaaatcgaaaaagcaagcccaacagccctcttgatgttaccgattatctatttcatttcggcgatattttctgtctttggttagctgagttccaaagcgatgagtttaaccgttcgttttatgtgtcgaggtggtaaatgcaaactctgaaagaactaatcgcatccaatcctgacgacttaacaactgaacttaagagagcatttcgtccactcacaccgcatattgcaattgatggtaatgaacttgacgcactgacgatattagtcaatttaaccgataagactgatgatcagaaagacctgctcgatcgagccaaatgcaagcaaaaacttcgagatgaaaaatggtgggctagctgcataaattgcgttaattacagacaaagccataacccaaaattcccggatatacgttctgaaggcgtgattcgaacccaagccctgggtgaattaccgagtttcctactctcgtcctcaaaaatcccaccataccattggtcatatagccatgattcaaaatacgtcaacaaaagcgcattcctcaccaatgagttttgttgggatggtgagatctcatgtttgggtgagcttcttaaagatgcagatcacccactttggaatactttgaaaaagttaggttgttctcaaaaaacttgcaaagcaatggcaaaacaactagctgatattactctcacgactatcaatgtcacactcgcaccaaattacctgactcaaatatctctccccgatagtgatacatcctacatttcactctctcctgttgcatcgctatcgatgcaaagccactttcatcagaggctccaagatgaaaatcggcatagcgcgataacgcggtttagccgaactaccaacatgggggtcactgcgatgacatgtggcggcgcatttagaatgttaaagtctggcgctaagttttccagcccccctcatcaccgattaaacagtaaacgaagttggttgacgtcagagcatgttcagtcattaaaacagtaccagcgcctcaacaaaagcctcatacctgaaaactctcggattgcactccgtagaaaatacaaaatcgagcttcaaaatatggtcagatcttggtttgcaatgcaagaccatacccttgattcgaacatacttatccaacatttgaatcatgacctatcttacttaggagccacaaaacgttttgcatacgatccagcgatgaccaagctctttactgagcttttgaaacgagagttatcaaattcaatcaataatggtgagcaacacactaatggatcgtttttagtcctaccgaatatcagggtttgtggcgcaacagctttaagctccccggtaacggtggggattccatcacttacagctttctttggcttcgttcacgcatttgaacggaatataaatcgcaccacctcatcgtttcgtgttgaatcctttgcgatatgcgtccatcaactacatgtcgagaagcgaggtttgacagcagagtttgtggaaaaaggcgacgggactatatccgctcccgcgacccgggatgactggcagtgtgatgtcgtatttagccttattttgaacaccaactttgctcaacatattgaccaagatacgttagttacatcactaccaaagcgattggctcggggttcagcaaaaattgcgattgatgactttaaacatatcaactcattctcgacattagaaacagcgatcgaatctctgccaatagaagctggtaggtggttatcactttacgcacagtcaaacaataatctaagtgatctattagcagccatgacagaggaccatcagctcatggcaagctgcgtcggttaccacttgttagaagagcccaaagataaaccaaactccctcagaggttacaaacacgctatcgccgagtgcatcattggactcattaactcaatcacctttagctcagagactgatcccaacacaatcttttggtcgctaaagaactatcaaaactacctagtggtacagccaaggagtatcaacgatgaaactaccgacaaatctagcctatgagcgctctatcgacccatcagatgtctgtttttttgtcgtctggcccgatgatagaaaaacacctttaacctacaattctcgtactctgctcgggcaaatggaagcggcatcattagcctatgatgtctcaggtcaaccaataaaaagtgccaccgctgaggcgttagctcaagggaaccctcatcaagttgatttctgccacgttccatacggtgcgagtcatattgaatgcagtttctccgtctcgttttcttctgaactacgtcaaccatataagtgtaactcaagcaaagttaaacaaacgctagtgcaattagtcgagctctacgaaacgaaaatcggctggactgagctagcaacccgatatttgatgaacatttgcaacggtaaatggctgtggaaaaatacccgtaaagcctattgctggaacattgtacttacaccttggccttggaacggggaaaaggttggatttgaagatattcgtactaactacacctcacggcaagactttaaaaataataaaaattggtctgctatagttgaaatgatcaaaaccgcattttctagtactgatgggctggcgatatttgaagtcagggccaccttgcacttgccaacgaatgctatggtgcggccaagccaagttttcacagaaaaagaaagtggcagtaaaagtaaatctaaaactcaaaacagtcgagtttttcagagtacaactattgatggtgaacgatcgccaatactaggggcctttaaaacgggagcagctattgcaaccattgacgactggtatcctgaagccactgagccactaagggtcggacggtttggggttcatcgcgaagatgtcacttgctaccgtcatccgtctaccggaaaagattttttctcgatattacaacaagcagagcactatattgaagtgttgagcgccaacaaaactcccgctcaagaaactatcaacgacatgcactttttaatggctaacctgattaagggtgggatgttccagcataaaggagactgactgtgaaatggtattataagacaatcacctttctgccagagttgtgcaacaacgagtcactggctgcaaagtgtctccgcgttctgcatggatttaactatcagtatgagacacgaaatatcggcgtttcatttccgctttggtgtgatgcaacggttggaaaaaagatttcatttgtcagcaagaacaagatagaactcgacttactacttaaacaacactatttcgtccaaatggaacaacttcaatactttcatatatccaacactgttctcgtcccagaagattgtacatacgtttcctttagacgctgtcaatctatagataagctcacagcagcagggctggcaaggaaaatcagacgcctggagaaacgtgctctatctagaggcgagcaatttgacccatcatcttttgctcaaaaagagcatactgcaatagcgcactaccactcacttggggagtccagcaaacagacgaaccgcaactttcgactcaatatcaggatgctctcggagcaaccccgtgaggggaactcgatttttagtagctatggcttatcaaattcagaaaactcgtttcagcctgtacccttaatctgacctttaataaggagatataccatggcgacaagtttacctacgccctcagcaattacgacttcggcgttagagtatgcattccatactcccgctcgcaatctaacgaaatctcgcggaaaaaacattcatcgttatgtcagtgtaaagatgagtaagaggattacggtagaatctactctagagtgtgatgcctgctatcactttgattttgagccaagtattgttcgcttttgcgctcaaccgattcgatttttatattatctcaatggtcagtctcactcctatgttcctgactttctagttcaatttgataccaacgagtttgttctatatgaagtaaagtcagcttatgctaagaacaaacctgattttgatgttgaatgggaggcgaaagtaaaagcagcaactgaactagggctagaattggagcttgttgaagagagtgatattagggatacggttgtattaaataatcttaagcgcatgcatcgttatgcttcgaaagatgagctgaataacgtacataactctctcttaaaaataataaagtacaatggcgcccaatctgcaagatgcttgggagaacagttgggtttaaaaggccgaactgttttaccaattttgtgcgatttgctgtcaaggtgtttactcgatacacgtttggataagcctctatctcttgaatctcgatttgagttggccagttatggctaagaaagggttctcaagtttccatagaaaagcagtctcttcccaagatacgcttgaatcgatagagcttgtctctagcgctaattgtctagaaagtgttacgtatcaagatatatcagcatttcccgaaacaattgcggtagagattaatttccgattaagcattcttcgctttttagcgcgaaagtgcgaaaccattgtggccaaatcaattgaaccacatcgtgtagagctacagcaaaactatagtagaaaaatacccagtgcaataacgatatatcgatggtggcttgcttttcgaaaatcagactacaaccccattagcttagcacctaatatcaaggatagaggtaatagagagacaaaagtgtcaacagttgttgattctattatggaacaggcagttgaaagagttatatctggacgaaaagtcaatgttagctctgcatataaacgtgttcgacgaaaagttcgtcaatacaatctaactcatggaacgaaatacacgtatcctaagtacgaatctgtaagaaagcgagtaaaaaagaaaaccccatttgagttattagccgcagggaaaggggagagagtagctaagagagagtttcgccgaatgggaaaaaagatcctcacgtctagcgtgctagagagggttgaaatagatcacactgtcgttgacctttttgcagtacacgaagagtatcgaatcccattgggccgaccttggcttactcaattggttgattgttacagtaaagctgtaatcggtttttatttaggtttcgagcctcctagctatgtgtcggtttcccttgcacttaagaatgcaatacaacgcaaagatgacttaatctcctcgtatgaatcgatcgagaatgaatggctatgttatggcatcccagacctactcgtaactgataatggtaaagagtttttgtcgaaagcatttgatcaagcatgtgaatcactattgatcaatgtgcatcaaaataaagttgagacgcccgacaacaaacctcatgttgaacgtaactacgggactattaatacttctctgttagacgatttacctgggaaatccttcagccagtaccttcaaagagaagggtacgactctgtgggagaagctacccttacactcaatgagattagagaaatttacttaatttggttggtggatatttatcataaaaaacccaatcagagaggcactaattgtcctaatgttgcgtggaaaaagggttgtcaagaatgggaaccagaggagttctctggttctaaagacgaattagactttaaatttgctattgttgattacaaacaacttactaaagtagggataactgtctacaaagaactgagttatagcaatgaccgtttagctgaatatagagggaagaaaggaaaccataaagttcagttcaagtataaccctgagtgtatggcagttatttgggtgttggatgaggatatgaatgagtactttacagttaatgcgattgactacgaatatgcaagtagagtatcactttggcaacataaatataacatgaaatatcaagcagaactaaattcagcagaatatgatgaggacaaggaaattgatgcagaaataaaaattgaagaaatcgcagatcgttcaattgttaagactaacaaaatcagagctcggaggcgtggcgctaggcatcaagagaatagcgcaagggctaagtcaatcagtaatgcgaacccggcctcgatacaaaaacatgaagatgaaatcgttagtgcagataatgacgattgggatattgattatgtctgagaaatcgtcaaatgagtgaaacgcgtgaggctcgtatatcaagagctaaaagggcatttgtatccacaccgagcgttaggaaaatcttgagttacatggatagatgtagagatctatcagacctagagtctgagcctacatgcatgatggtctatggtgcttcgggtgtaggtaaaacgaccgtcatcaagaaatacttaaatcaaaacagaagagagtccgaagccgggggcgatataataccggttttgcatattgagttgccagacaatgcgaagccagtagatgcagcaagggaattgctggttgaaatgggtgacccgctagcactttatgaaactgacttagctagattgacgaaaagactgactgaattaatccctgcggtcggcgtgaagctgattattatcgatgagttccaacatttggtggaagaaaggtcaaatcgggttcttacccaagtaggtaattggctaaaaatgatacttaacaaaacgaaatgtccaattgttatatttggtatgccatactcaaaagttgtactgcaagcaaactcgcaacttcacgggcgattttccattcaggttgaactgcgcccctttagctaccagggaggtagaggtgtatttaaaacttttttggaataccttgataaagccctaccttttgaaaaacaggctggcttagccaacgaaagtttgcagaaaaaattgtatgcattctctcagggaaacatgcgttcgttgagaaaccttatttatcaagcatctatcgaagcaattgataatcagcatgagacgataaccgaagaagatttcgtttttgcatcgaagttgacatcgggcgataaacccaactcatggaaaaatccttttgaggagggtgttgaggtaacagaagatatgttacgaccgccaccaaaagatattggttgggaggactatttgagacattcaaccccgagagtgagtaaaccaggtagaaataaaaactttttcgaataacctaggctgctgcgctgctgccaccgctgagcaataactagcataaccccttggggcctctaaacgggtcttgaggggttttttgctgaaacctcaggcatttgagaagcacacggtcacactgcttccggtagtcaataaaccggtaaaccagcaatagacataagcggctatttaacgaccctgccctgaaccgacgaccgggtcatcgtggccggatcttgcggcccctcggcttgaacgaattgttagacattatttgccgactaccttggtgatctcgcctttcacgtagtggacaaattcttccaactgatctgcgcgcgaggccaagcgatcttcttcttgtccaagataagcctgtctagcttcaagtatgacgggctgatactgggccggcaggcgctccattgcccagtcggcagcgacatccttcggcgcgattttgccggttactgcgctgtaccaaatgcgggacaacgtaagcactacatttcgctcatcgccagcccagtcgggcggcgagttccatagcgttaaggtttcatttagcgcctcaaatagatcctgttcaggaaccggatcaaagagttcctccgccgctggacctaccaaggcaacgctatgttctcttgcttttgtcagcaagatagccagatcaatgtcgatcgtggctggctcgaagatacctgcaagaatgtcattgcgctgccattctccaaattgcagttcgcgcttagctggataacgccacggaatgatgtcgtcgtgcacaacaatggtgacttctacagcgcggagaatctcgctctctccaggggaagccgaagtttccaaaaggtcgttgatcaaagctcgccgcgttgtttcatcaagccttacggtcaccgtaaccagcaaatcaatatcactgtgtggcttcaggccgccatccactgcggagccgtacaaatgtacggccagcaacgtcggttcgagatggcgctcgatgacgccaactacctctgatagttgagtcgatacttcggcgatcaccgcttccctcatactcttcctttttcaatattattgaagcatttatcagggttattgtctcatgagcggatacatatttgaatgtatttagaaaaataaacaaatagctagctcactcggtcgctacgctccgggcgtgagactgcggcgggcgctgcggacacatacaaagttacccacagattccgtggataagcaggggactaacatgtgaggcaaaacagcagggccgcgccggtggcgtttttccataggctccgccctcctgccagagttcacataaacagacgcttttccggtgcatctgtgggagccgtgaggctcaaccatgaatctgacagtacgggcgaaacccgacaggacttaaagatccccaccgtttccggcgggtcgctccctcttgcgctctcctgttccgaccctgccgtttaccggatacctgttccgcctttctcccttacgggaagtgtggcgctttctcatagctcacacactggtatctcggctcggtgtaggtcgttcgctccaagctgggctgtaagcaagaactccccgttcagcccgactgctgcgccttatccggtaactgttcacttgagtccaacccggaaaagcacggtaaaacgccactggcagcagccattggtaactgggagttcgcagaggatttgtttagctaaacacgcggttgctcttgaagtgtgcgccaaagtccggctacactggaaggacagatttggttgctgtgctctgcgaaagccagttaccacggttaagcagttccccaactgacttaaccttcgatcaaaccacctccccaggtggttttttcgtttacagggcaaaagattacgcgcagaaaaaaaggatctcaagaagatcctttgatc

SEQ ID NO: 5158 - DNA, 11812 bp, synthetic construct
  source 1..11812: mol_type = other DNA
ttttctactgaaccgctctagatttcagtgcaatttatctcttcaaatgtagcacctgaagtcagccccatacgatataagttgtaattctcatgttagtcatgccccgcgcccaccggaaggagctgactgggttgaaggctctcaagggcatcggtcgagatcccggtgcctaatgagtgagctaacttacattaattgcgttgcgctcactgcccgctttccagtcgggaaacctgtcgtgccagctgcattaatgaatcggccaacgcgcggggagaggcggtttgcgtattgggcgccagggtggtttttcttttcaccagtgagacgggcaacagctgattgcccttcaccgcctggccctgagagagttgcagcaagcggtccacgctggtttgccccagcaggcgaaaatcctgtttgatggtggttaacggcgggatataacatgagctgtcttcggtatcgtcgtatcccactaccgagatgtccgcaccaacgcgcagcccggactcggtaatggcgcgcattgcgcccagcgccatctgatcgttggcaaccagcatcgcagtgggaacgatgccctcattcagcatttgcatggtttgttgaaaaccggacatggcactccagtcgccttcccgttccgctatcggctgaatttgattgcgagtgagatatttatgccagccagccagacgcagacgcgccgagacagaacttaatgggcccgctaacagcgcgatttgctggtgacccaatgcgaccagatgctccacgcccagtcgcgtaccgtcttcatgggagaaaataatactgttgatgggtgtctggtcagagacatcaagaaataacgccggaacattagtgcaggcagcttccacagcaatggcatcctggtcatccagcggatagttaatgatcagcccactgacgcgttgcgcgagaagattgtgcaccgccgctttacaggcttcgacgccgcttcgttctaccatcgacaccaccacgctggcacccagttgatcggcgcgagatttaatcgccgcgacaatttgcgacggcgcgtgcagggccagactggaggtggcaacgccaatcagcaacgactgtttgcccgccagttgttgtgccacgcggttgggaatgtaattcagctccgccatcgccgcttccactttttcccgcgttttcgcagaaacgtggctggcctggttcaccacgcgggaaacggtctgataagagacaccggcatactctgcgacatcgtataacgttactggtttcacattcaccaccctgaattgactctcttccgggcgctatcatgccataccgcgaaaggttttgcgccattcgatggtgtccgggatctcgacgctctcccttatgcgactcctgcattaggaaattaatacgactcactataggggaattgtgagcggataacaattcccctgtagaaataattttgtttaactttaataaggagatataccatgggtgaactgccgagtaggtagctgataacgcgccactggtgtgggccataattcaattcgcgtgaactgccgagtaggtagctgataacggatccgaattcgagcgaaggagatatacatatgtttttgcaaagacctaaaccttacagcgatgaaagtttagaaagtttctttatccgagtggctaacaaaaatggctacggtgatgtccatcgcttcctagaagccactaaacgattccttcaagacattgaccataatggctatcaaacctttccgactgatataactcggataaacccatactcagctaaaaacagttccagcgcacgaactgcgtcattcctgaaacttgcacaattgacatttaatgaaccgccagagctacttgggttggcaattaacagaacaaacatgaaatactcgccgtcaactagcgcggttgttagaggtgcagaagtctttcctcgcagtttactacggacgcactccatcccctgctgtcctttgtgtctgcgagaaaatggctacgcctcctacctttggcactttcaggggtacgaatactgccacagccataacgtacctttaattaccacttgtagctgtggtaaggagtttgactaccgagtatctgggttaaagggcatttgctgcaaatgcaaggagcctatcaccttaaccagcagggagaacggtcatgaggcagcgtgtactgtttcaaactggcttgctggccatgaatctaaacctctgccaaatcttcctaaaagctaccgatggggtttagttcattggtggatgggtattaaagatagcgagttcgatcacttttcgttcgttcaatttttctcaaactggccaaggtcattccactcgataatcgaagatgaagtagagttcaaccttgagcatgctgttgtcagcacgtctgaattacgactaaaagatcttcttggtcgattgtttttcggttcaattcggttacctgagcggaatcttcaacacaatatcatccttggtgagcttctctgctatttagaaaatcgtttatggcaagacaagggattaatcgccaacctcaaaatgaacgcgttagaggcgactgtaatgttaaattgtagcctcgatcagattgcatcaatggttgaacaacgcatcttgaagccaaatcgaaaaagcaagcccaacagccctcttgatgttaccgattatctatttcatttcggcgatattttctgtctttggttagctgagttccaaagcgatgagtttaaccgttcgttttatgtgtcgaggtggtaaatgcaaactctgaaagaactaatcgcatccaatcctgacgacttaacaactgaacttaagagagcatttcgtccactcacaccgcatattgcaattgatggtaatgaacttgacgcactgacgatattagtcaatttaaccgataagactgatgatcagaaagacctgctcgatcgagccaaatgcaagcaaaaacttcgagatgaaaaatggtgggctagctgcataaattgcgttaattacagacaaagccataacccaaaattcccggatatacgttctgaaggcgtgattcgaacccaagccctgggtgaattaccgagtttcctactctcgtcctcaaaaatcccaccataccattggtcatatagccatgattcaaaatacgtcaacaaaagcgcattcctcaccaatgagttttgttgggatggtgagatctcatgtttgggtgagcttcttaaagatgcagatcacccactttggaatactttgaaaaagttaggttgttctcaaaaaacttgcaaagcaatggcaaaacaactagctgatattactctcacgactatcaatgtcacactcgcaccaaattacctgactcaaatatctctccccgatagtgatacatcctacatttcactctctcctgttgcatcgctatcgatgcaaagccactttcatcagaggctccaagatgaaaatcggcatagcgcgataacgcggtttagccgaactaccaacatgggggtcactgcgatgacatgtggcggcgcatttagaatgttaaagtctggcgctaagttttccagcccccctcatcaccgattaaacagtaaacgaagttggttgacgtcagagcatgttcagtcattaaaacagtaccagcgcctcaacaaaagcctcatacctgaaaactctcggattgcactccgtagaaaatacaaaatcgagcttcaaaatatggtcagatcttggtttgcaatgcaagaccatacccttgattcgaacatacttatccaacatttgaatcatgacctatcttacttaggagccacaaaacgttttgcatacgatccagcgatgaccaagctctttactgagcttttgaaacgagagttatcaaattcaatcaataatggtgagcaacacactaatggatcgtttttagtcctaccgaatatcagggtttgtggcgcaacagctttaagctccccggtaacggtggggattccatcacttacagctttctttggcttcgttcacgcatttgaacggaatataaatcgcaccacctcatcgtttcgtgttgaatcctttgcgatatgcgtccatcaactacatgtcgagaagcgaggtttgacagcagagtttgtggaaaaaggcgacgggactatatccgctcccgcgacccgggatgactggcagtgtgatgtcgtatttagccttattttgaacaccaactttgctcaacatattgaccaagatacgttagttacatcactaccaaagcgattggctcggggttcagcaaaaattgcgattgatgactttaaacatatcaactcattctcgacattagaaacagcgatcgaatctctgccaatagaagctggtaggtggttatcactttacgcacagtcaaacaataatctaagtgatctattagcagccatgacagaggaccatcagctcatggcaagctgcgtcggttaccacttgttagaagagcccaaagataaaccaaactccctcagaggttacaaacacgctatcgccgagtgcatcattggactcattaactcaatcacctttagctcagagactgatcccaacacaatcttttggtcgctaaagaactatcaaaactacctagtggtacagccaaggagtatcaacgatgaaactaccgacaaatctagcctatgagcgctctatcgacccatcagatgtctgtttttttgtcgtctggcccgatgatagaaaaacacctttaacctacaattctcgtactctgctcgggcaaatggaagcggcatcattagcctatgatgtctcaggtcaaccaataaaaagtgccaccgctgaggcgttagctcaagggaaccctcatcaagttgatttctgccacgttccatacggtgcgagtcatattgaatgcagtttctccgtctcgttttcttctgaactacgtcaaccatataagtgtaactcaagcaaagttaaacaaacgctagtgcaattagtcgagctctacgaaacgaaaatcggctggactgagctagcaacccgatatttgatgaacatttgcaacggtaaatggctgtggaaaaatacccgtaaagcctattgctggaacattgtacttacaccttggccttggaacggggaaaaggttggatttgaagatattcgtactaactacacctcacggcaagactttaaaaataataaaaattggtctgctatagttgaaatgatcaaaaccgcattttctagtactgatgggctggcgatatttgaagtcagggccaccttgcacttgccaacgaatgctatggtgcggccaagccaagttttcacagaaaaagaaagtggcagtaaaagtaaatctaaaactcaaaacagtcgagtttttcagagtacaactattgatggtgaacgatcgccaatactaggggcctttaaaacgggagcagctattgcaaccattgacgactggtatcctgaagccactgagccactaagggtcggacggtttggggttcatcgcgaagatgtcacttgctaccgtcatccgtctaccggaaaagattttttctcgatattacaacaagcagagcactatattgaagtgttgagcgccaacaaaactcccgctcaagaaactatcaacgacatgcactttttaatggctaacctgattaagggtgggatgttccagcataaaggagactgactgtgaaatggtattataagacaatcacctttctgccagagttgtgcaacaacgagtcactggctgcaaagtgtctccgcgttctgcatggatttaactatcagtatgagacacgaaatatcggcgtttcatttccgctttggtgtgatgcaacggttggaaaaaagatttcatttgtcagcaagaacaagatagaactcgacttactacttaaacaacactatttcgtccaaatggaacaacttcaatactttcatatatccaacactgttctcgtcccagaagattgtacatacgtttcctttagacgctgtcaatctatagataagctcacagcagcagggctggcaaggaaaatcagacgcctggagaaacgtgctctatctagaggcgagcaatttgacccatcatcttttgctcaaaaagagcatactgcaatagcgcactaccactcacttggggagtccagcaaacagacgaaccgcaactttcgactcaatatcaggatgctctcggagcaaccccgtgaggggaactcgatttttagtagctatggcttatcaaattcagaaaactcgtttcagcctgtacccttaatctgacctttaataaggagatataccatggcgacaagtttacctacgccctcagcaattacgacttcggcgttagagtatgcattccatactcccgctcgcaatctaacgaaatctcgcggaaaaaacattcatcgttatgtcagtgtaaagatgagtaagaggattacggtagaatctactctagagtgtgatgcctgctatcactttgattttgagccaagtattgttcgcttttgcgctcaaccgattcgatttttatattatctcaatggtcagtctcactcctatgttcctgactttctagttcaatttgataccaacgagtttgttctatatgaagtaaagtcagcttatgctaagaacaaacctgattttgatgttgaatgggaggcgaaagtaaaagcagcaactgaactagggctagaattggagcttgttgaagagagtgatattagggatacggttgtattaaataatcttaagcgcatgcatcgttatgcttcgaaagatgagctgaataacgtacataactctctcttaaaaataataaagtacaatggcgcccaatctgcaagatgcttgggagaacagttgggtttaaaaggccgaactgttttaccaattttgtgcgatttgctgtcaaggtgtttactcgatacacgtttggataagcctctatctcttgaatctcgatttgagttggccagttatggctaagaaagggttctcaagtttccatagaaaagcagtctcttcccaagatacgcttgaatcgatagagcttgtctctagcgctaattgtctagaaagtgttacgtatcaagatatatcagcatttcccgaaacaattgcggtagagattaatttccgattaagcattcttcgctttttagcgcgaaagtgcgaaaccattgtggccaaatcaattgaaccacatcgtgtagagctacagcaaaactatagtagaaaaatacccagtgcaataacgatatatcgatggtggcttgcttttcgaaaatcagactacaaccccattagcttagcacctaatatcaaggatagaggtaatagagagacaaaagtgtcaacagttgttgattctattatggaacaggcagttgaaagagttatatctggacgaaaagtcaatgttagctctgcatataaacgtgttcgacgaaaagttcgtcaatacaatctaactcatggaacgaaatacacgtatcctaagtacgaatctgtaagaaagcgagtaaaaaagaaaaccccatttgagttattagccgcagggaaaggggagagagtagctaagagagagtttcgccgaatgggaaaaaagatcctcacgtctagcgtgctagagagggttgaaatagatcacactgtcgttgacctttttgcagtacacgaagagtatcgaatcccattgggccgaccttggcttactcaattggttgattgttacagtaaagctgtaatcggtttttatttaggtttcgagcctcctagctatgtgtcggtttcccttgcacttaagaatgcaatacaacgcaaagatgacttaatctcctcgtatgaatcgatcgagaatgaatggctatgttatggcatcccagacctactcgtaactgataatggtaaagagtttttgtcgaaagcatttgatcaagcatgtgaatcactattgatcaatgtgcatcaaaataaagttgagacgcccgacaacaaacctcatgttgaacgtaactacgggactattaatacttctctgttagacgatttacctgggaaatccttcagccagtaccttcaaagagaagggtacgactctgtgggagaagctacccttacactcaatgagattagagaaatttacttaatttggttggtggatatttatcataaaaaacccaatcagagaggcactaattgtcctaatgttgcgtggaaaaagggttgtcaagaatgggaaccagaggagttctctggttctaaagacgaattagactttaaatttgctattgttgattacaaacaacttactaaagtagggataactgtctacaaagaactgagttatagcaatgaccgtttagctgaatatagagggaagaaaggaaaccataaagttcagttcaagtataaccctgagtgtatggcagttatttgggtgttggatgaggatatgaatgagtactttacagttaatgcgattgactacgaatatgcaagtagagtatcactttggcaacataaatataacatgaaatatcaagcagaactaaattcagcagaatatgatgaggacaaggaaattgatgcagaaataaaaattgaagaaatcgcagatcgttcaattgttaagactaacaaaatcagagctcggaggcgtggcgctaggcatcaagagaatagcgcaagggctaagtcaatcagtaatgcgaacccggcctcgatacaaaaacatgaagatgaaatcgttagtgcagataatgacgattgggatattgattatgtctgagaaatcgtcaaatgagtgaaacgcgtgaggctcgtatatcaagagctaaaagggcatttgtatccacaccgagcgttaggaaaatcttgagttacatggatagatgtagagatctatcagacctagagtctgagcctacatgcatgatggtctatggtgcttcgggtgtaggtaaaacgaccgtcatcaagaaatacttaaatcaaaacagaagagagtccgaagccgggggcgatataataccggttttgcatattgagttgccagacaatgcgaagccagtagatgcagcaagggaattgctggttgaaatgggtgacccgctagcactttatgaaactgacttagctagattgacgaaaagactgactgaattaatccctgcggtcggcgtgaagctgattattatcgatgagttccaacatttggtggaagaaaggtcaaatcgggttcttacccaagtaggtaattggctaaaaatgatacttaacaaaacgaaatgtccaattgttatatttggtatgccatactcaaaagttgtactgcaagcaaactcgcaacttcacgggcgattttccattcaggttgaactgcgcccctttagctaccagggaggtagaggtgtatttaaaacttttttggaataccttgataaagccctaccttttgaaaaacaggctggcttagccaacgaaagtttgcagaaaaaattgtatgcattctctcagggaaacatgcgttcgttgagaaaccttatttatcaagcatctatcgaagcaattgataatcagcatgagacgataaccgaagaagatttcgtttttgcatcgaagttgacatcgggcgataaacccaactcatggaaaaatccttttgaggagggtgttgaggtaacagaagatatgttacgaccgccaccaaaagatattggttgggaggactatttgagacattcaaccccgagagtgagtaaaccaggtagaaataaaaactttttcgaataacctaggctgctgcgctgctgccaccgctgagcaataactagcataaccccttggggcctctaaacgggtcttgaggggttttttgctgaaacctcaggcatttgagaagcacacggtcacactgcttccggtagtcaataaaccggtaaaccagcaatagacataagcggctatttaacgaccctgccctgaaccgacgaccgggtcatcgtggccggatcttgcggcccctcggcttgaacgaattgttagacattatttgccgactaccttggtgatctcgcctttcacgtagtggacaaattcttccaactgatctgcgcgcgaggccaagcgatcttcttcttgtccaagataagcctgtctagcttcaagtatgacgggctgatactgggccggcaggcgctccattgcccagtcggcagcgacatccttcggcgcgattttgccggttactgcgctgtaccaaatgcgggacaacgtaagcactacatttcgctcatcgccagcccagtcgggcggcgagttccatagcgttaaggtttcatttagcgcctcaaatagatcctgttcaggaaccggatcaaagagttcctccgccgctggacctaccaaggcaacgctatgttctcttgcttttgtcagcaagatagccagatcaatgtcgatcgtggctggctcgaagatacctgcaagaatgtcattgcgctgccattctccaaattgcagttcgcgcttagctggataacgccacggaatgatgtcgtcgtgcacaacaatggtgacttctacagcgcggagaatctcgctctctccaggggaagccgaagtttccaaaaggtcgttgatcaaagctcgccgcgttgtttcatcaagccttacggtcaccgtaaccagcaaatcaatatcactgtgtggcttcaggccgccatccactgcggagccgtacaaatgtacggccagcaacgtcggttcgagatggcgctcgatgacgccaactacctctgatagttgagtcgatacttcggcgatcaccgcttccctcatactcttcctttttcaatattattgaagcatttatcagggttattgtctcatgagcggatacatatttgaatgtatttagaaaaataaacaaatagctagctcactcggtcgctacgctccgggcgtgagactgcggcgggcgctgcggacacatacaaagttacccacagattccgtggataagcaggggactaacatgtgaggcaaaacagcagggccgcgccggtggcgtttttccataggctccgccctcctgccagagttcacataaacagacgcttttccggtgcatctgtgggagccgtgaggctcaaccatgaatctgacagtacgggcgaaacccgacaggacttaaagatccccaccgtttccggcgggtcgctccctcttgcgctctcctgttccgaccctgccgtttaccggatacctgttccgcctttctcccttacgggaagtgtggcgctttctcatagctcacacactggtatctcggctcggtgtaggtcgttcgctccaagctgggctgtaagcaagaactccccgttcagcccgactgctgcgccttatccggtaactgttcacttgagtccaacccggaaaagcacggtaaaacgccactggcagcagccattggtaactgggagttcgcagaggatttgtttagctaaacacgcggttgctcttgaagtgtgcgccaaagtccggctacactggaaggacagatttggttgctgtgctctgcgaaagccagttaccacggttaagcagttccccaactgacttaaccttcgatcaaaccacctccccaggtggttttttcgtttacagggcaaaagattacgcgcagaaaaaaaggatctcaagaagatcctttgatc

SEQ ID NO: 5159 - DNA, 11812 bp, synthetic construct
  source 1..11812: mol_type = other DNA
ttttctactgaaccgctctagatttcagtgcaatttatctcttcaaatgtagcacctgaagtcagccccatacgatataagttgtaattctcatgttagtcatgccccgcgcccaccggaaggagctgactgggttgaaggctctcaagggcatcggtcgagatcccggtgcctaatgagtgagctaacttacattaattgcgttgcgctcactgcccgctttccagtcgggaaacctgtcgtgccagctgcattaatgaatcggccaacgcgcggggagaggcggtttgcgtattgggcgccagggtggtttttcttttcaccagtgagacgggcaacagctgattgcccttcaccgcctggccctgagagagttgcagcaagcggtccacgctggtttgccccagcaggcgaaaatcctgtttgatggtggttaacggcgggatataacatgagctgtcttcggtatcgtcgtatcccactaccgagatgtccgcaccaacgcgcagcccggactcggtaatggcgcgcattgcgcccagcgccatctgatcgttggcaaccagcatcgcagtgggaacgatgccctcattcagcatttgcatggtttgttgaaaaccggacatggcactccagtcgccttcccgttccgctatcggctgaatttgattgcgagtgagatatttatgccagccagccagacgcagacgcgccgagacagaacttaatgggcccgctaacagcgcgatttgctggtgacccaatgcgaccagatgctccacgcccagtcgcgtaccgtcttcatgggagaaaataatactgttgatgggtgtctggtcagagacatcaagaaataacgccggaacattagtgcaggcagcttccacagcaatggcatcctggtcatccagcggatagttaatgatcagcccactgacgcgttgcgcgagaagattgtgcaccgccgctttacaggcttcgacgccgcttcgttctaccatcgacaccaccacgctggcacccagttgatcggcgcgagatttaatcgccgcgacaatttgcgacggcgcgtgcagggccagactggaggtggcaacgccaatcagcaacgactgtttgcccgccagttgttgtgccacgcggttgggaatgtaattcagctccgccatcgccgcttccactttttcccgcgttttcgcagaaacgtggctggcctggttcaccacgcgggaaacggtctgataagagacaccggcatactctgcgacatcgtataacgttactggtttcacattcaccaccctgaattgactctcttccgggcgctatcatgccataccgcgaaaggttttgcgccattcgatggtgtccgggatctcgacgctctcccttatgcgactcctgcattaggaaattaatacgactcactataggggaattgtgagcggataacaattcccctgtagaaataattttgtttaactttaataaggagatataccatgggtgaactgccgagtaggtagctgataacaaaagtttgtgttttttaaatagtacataatggtgaactgccgagtaggtagctgataacggatccgaattcgagcgaaggagatatacatatgtttttgcaaagacctaaaccttacagcgatgaaagtttagaaagtttctttatccgagtggctaacaaaaatggctacggtgatgtccatcgcttcctagaagccactaaacgattccttcaagacattgaccataatggctatcaaacctttccgactgatataactcggataaacccatactcagctaaaaacagttccagcgcacgaactgcgtcattcctgaaacttgcacaattgacatttaatgaaccgccagagctacttgggttggcaattaacagaacaaacatgaaatactcgccgtcaactagcgcggttgttagaggtgcagaagtctttcctcgcagtttactacggacgcactccatcccctgctgtcctttgtgtctgcgagaaaatggctacgcctcctacctttggcactttcaggggtacgaatactgccacagccataacgtacctttaattaccacttgtagctgtggtaaggagtttgactaccgagtatctgggttaaagggcatttgctgcaaatgcaaggagcctatcaccttaaccagcagggagaacggtcatgaggcagcgtgtactgtttcaaactggcttgctggccatgaatctaaacctctgccaaatcttcctaaaagctaccgatggggtttagttcattggtggatgggtattaaagatagcgagttcgatcacttttcgttcgttcaatttttctcaaactggccaaggtcattccactcgataatcgaagatgaagtagagttcaaccttgagcatgctgttgtcagcacgtctgaattacgactaaaagatcttcttggtcgattgtttttcggttcaattcggttacctgagcggaatcttcaacacaatatcatccttggtgagcttctctgctatttagaaaatcgtttatggcaagacaagggattaatcgccaacctcaaaatgaacgcgttagaggcgactgtaatgttaaattgtagcctcgatcagattgcatcaatggttgaacaacgcatcttgaagccaaatcgaaaaagcaagcccaacagccctcttgatgttaccgattatctatttcatttcggcgatattttctgtctttggttagctgagttccaaagcgatgagtttaaccgttcgttttatgtgtcgaggtggtaaatgcaaactctgaaagaactaatcgcatccaatcctgacgacttaacaactgaacttaagagagcatttcgtccactcacaccgcatattgcaattgatggtaatgaacttgacgcactgacgatattagtcaatttaaccgataagactgatgatcagaaagacctgctcgatcgagccaaatgcaagcaaaaacttcgagatgaaaaatggtgggctagctgcataaattgcgttaattacagacaaagccataacccaaaattcccggatatacgttctgaaggcgtgattcgaacccaagccctgggtgaattaccgagtttcctactctcgtcctcaaaaatcccaccataccattggtcatatagccatgattcaaaatacgtcaacaaaagcgcattcctcaccaatgagttttgttgggatggtgagatctcatgtttgggtgagcttcttaaagatgcagatcacccactttggaatactttgaaaaagttaggttgttctcaaaaaacttgcaaagcaatggcaaaacaactagctgatattactctcacgactatcaatgtcacactcgcaccaaattacctgactcaaatatctctccccgatagtgatacatcctacatttcactctctcctgttgcatcgctatcgatgcaaagccactttcatcagaggctccaagatgaaaatcggcatagcgcgataacgcggtttagccgaactaccaacatgggggtcactgcgatgacatgtggcggcgcatttagaatgttaaagtctggcgctaagttttccagcccccctcatcaccgattaaacagtaaacgaagttggttgacgtcagagcatgttcagtcattaaaacagtaccagcgcctcaacaaaagcctcatacctgaaaactctcggattgcactccgtagaaaatacaaaatcgagcttcaaaatatggtcagatcttggtttgcaatgcaagaccatacccttgattcgaacatacttatccaacatttgaatcatgacctatcttacttaggagccacaaaacgttttgcatacgatccagcgatgaccaagctctttactgagcttttgaaacgagagttatcaaattcaatcaataatggtgagcaacacactaatggatcgtttttagtcctaccgaatatcagggtttgtggcgcaacagctttaagctccccggtaacggtggggattccatcacttacagctttctttggcttcgttcacgcatttgaacggaatataaatcgcaccacctcatcgtttcgtgttgaatcctttgcgatatgcgtccatcaactacatgtcgagaagcgaggtttgacagcagagtttgtggaaaaaggcgacgggactatatccgctcccgcgacccgggatgactggcagtgtgatgtcgtatttagccttattttgaacaccaactttgctcaacatattgaccaagatacgttagttacatcactaccaaagcgattggctcggggttcagcaaaaattgcgattgatgactttaaacatatcaactcattctcgacattagaaacagcgatcgaatctctgccaatagaagctggtaggtggttatcactttacgcacagtcaaacaataatctaagtgatctattagcagccatgacagaggaccatcagctcatggcaagctgcgtcggttaccacttgttagaagagcccaaagataaaccaaactccctcagaggttacaaacacgctatcgccgagtgcatcattggactcattaactcaatcacctttagctcagagactgatcccaacacaatcttttggtcgctaaagaactatcaaaactacctagtggtacagccaaggagtatcaacgatgaaactaccgacaaatctagcctatgagcgctctatcgacccatcagatgtctgtttttttgtcgtctggcccgatgatagaaaaacacctttaacctacaattctcgtactctgctcgggcaaatggaagcggcatcattagcctatgatgtctcaggtcaaccaataaaaagtgccaccgctgaggcgttagctcaagggaaccctcatcaagttgatttctgccacgttccatacggtgcgagtcatattgaatgcagtttctccgtctcgttttcttctgaactacgtcaaccatataagtgtaactcaagcaaagttaaacaaacgctagtgcaattagtcgagctctacgaaacgaaaatcggctggactgagctagcaacccgatatttgatgaacatttgcaacggtaaatggctgtggaaaaatacccgtaaagcctattgctggaacattgtacttacaccttggccttggaacggggaaaaggttggatttgaagatattcgtactaactacacctcacggcaagactttaaaaataataaaaattggtctgctatagttgaaatgatcaaaaccgcattttctagtactgatgggctggcgatatttgaagtcagggccaccttgcacttgccaacgaatgctatggtgcggccaagccaagttttcacagaaaaagaaagtggcagtaaaagtaaatctaaaactcaaaacagtcgagtttttcagagtacaactattgatggtgaacgatcgccaatactaggggcctttaaaacgggagcagctattgcaaccattgacgactggtatcctgaagccactgagccactaagggtcggacggtttggggttcatcgcgaagatgtcacttgctaccgtcatccgtctaccggaaaagattttttctcgatattacaacaagcagagcactatattgaagtgttgagcgccaacaaaactcccgctcaagaaactatcaacgacatgcactttttaatggctaacctgattaagggtgggatgttccagcataaaggagactgactgtgaaatggtattataagacaatcacctttctgccagagttgtgcaacaacgagtcactggctgcaaagtgtctccgcgttctgcatggatttaactatcagtatgagacacgaaatatcggcgtttcatttccgctttggtgtgatgcaacggttggaaaaaagatttcatttgtcagcaagaacaagatagaactcgacttactacttaaacaacactatttcgtccaaatggaacaacttcaatactttcatatatccaacactgttctcgtcccagaagattgtacatacgtttcctttagacgctgtcaatctatagataagctcacagcagcagggctggcaaggaaaatcagacgcctggagaaacgtgctctatctagaggcgagcaatttgacccatcatcttttgctcaaaaagagcatactgcaatagcgcactaccactcacttggggagtccagcaaacagacgaaccgcaactttcgactcaatatcaggatgctctcggagcaaccccgtgaggggaactcgatttttagtagctatggcttatcaaattcagaaaactcgtttcagcctgtacccttaatctgacctttaataaggagatataccatggcgacaagtttacctacgccctcagcaattacgacttcggcgttagagtatgcattccatactcccgctcgcaatctaacgaaatctcgcggaaaaaacattcatcgttatgtcagtgtaaagatgagtaagaggattacggtagaatctactctagagtgtgatgcctgctatcactttgattttgagccaagtattgttcgcttttgcgctcaaccgattcgatttttatattatctcaatggtcagtctcactcctatgttcctgactttctagttcaatttgataccaacgagtttgttctatatgaagtaaagtcagcttatgctaagaacaaacctgattttgatgttgaatgggaggcgaaagtaaaagcagcaactgaactagggctagaattggagcttgttgaagagagtgatattagggatacggttgtattaaataatcttaagcgcatgcatcgttatgcttcgaaagatgagctgaataacgtacataactctctcttaaaaataataaagtacaatggcgcccaatctgcaagatgcttgggagaacagttgggtttaaaaggccgaactgttttaccaattttgtgcgatttgctgtcaaggtgtttactcgatacacgtttggataagcctctatctcttgaatctcgatttgagttggccagttatggctaagaaagggttctcaagtttccatagaaaagcagtctcttcccaagatacgcttgaatcgatagagcttgtctctagcgctaattgtctagaaagtgttacgtatcaagatatatcagcatttcccgaaacaattgcggtagagattaatttccgattaagcattcttcgctttttagcgcgaaagtgcgaaaccattgtggccaaatcaattgaaccacatcgtgtagagctacagcaaaactatagtagaaaaatacccagtgcaataacgatatatcgatggtggcttgcttttcgaaaatcagactacaaccccattagcttagcacctaatatcaaggatagaggtaatagagagacaaaagtgtcaacagttgttgattctattatggaacaggcagttgaaagagttatatctggacgaaaagtcaatgttagctctgcatataaacgtgttcgacgaaaagttcgtcaatacaatctaactcatggaacgaaatacacgtatcctaagtacgaatctgtaagaaagcgagtaaaaaagaaaaccccatttgagttattagccgcagggaaaggggagagagtagctaagagagagtttcgccgaatgggaaaaaagatcctcacgtctagcgtgctagagagggttgaaatagatcacactgtcgttgacctttttgcagtacacgaagagtatcgaatcccattgggccgaccttggcttactcaattggttgattgttacagtaaagctgtaatcggtttttatttaggtttcgagcctcctagctatgtgtcggtttcccttgcacttaagaatgcaatacaacgcaaagatgacttaatctcctcgtatgaatcgatcgagaatgaatggctatgttatggcatcccagacctactcgtaactgataatggtaaagagtttttgtcgaaagcatttgatcaagcatgtgaatcactattgatcaatgtgcatcaaaataaagttgagacgcccgacaacaaacctcatgttgaacgtaactacgggactattaatacttctctgttagacgatttacctgggaaatccttcagccagtaccttcaaagagaagggtacgactctgtgggagaagctacccttacactcaatgagattagagaaatttacttaatttggttggtggatatttatcataaaaaacccaatcagagaggcactaattgtcctaatgttgcgtggaaaaagggttgtcaagaatgggaaccagaggagttctctggttctaaagacgaattagactttaaatttgctattgttgattacaaacaacttactaaagtagggataactgtctacaaagaactgagttatagcaatgaccgtttagctgaatatagagggaagaaaggaaaccataaagttcagttcaagtataaccctgagtgtatggcagttatttgggtgttggatgaggatatgaatgagtactttacagttaatgcgattgactacgaatatgcaagtagagtatcactttggcaacataaatataacatgaaatatcaagcagaactaaattcagcagaatatgatgaggacaaggaaattgatgcagaaataaaaattgaagaaatcgcagatcgttcaattgttaagactaacaaaatcagagctcggaggcgtggcgctaggcatcaagagaatagcgcaagggctaagtcaatcagtaatgcgaacccggcctcgatacaaaaacatgaagatgaaatcgttagtgcagataatgacgattgggatattgattatgtctgagaaatcgtcaaatgagtgaaacgcgtgaggctcgtatatcaagagctaaaagggcatttgtatccacaccgagcgttaggaaaatcttgagttacatggatagatgtagagatctatcagacctagagtctgagcctacatgcatgatggtctatggtgcttcgggtgtaggtaaaacgaccgtcatcaagaaatacttaaatcaaaacagaagagagtccgaagccgggggcgatataataccggttttgcatattgagttgccagacaatgcgaagccagtagatgcagcaagggaattgctggttgaaatgggtgacccgctagcactttatgaaactgacttagctagattgacgaaaagactgactgaattaatccctgcggtcggcgtgaagctgattattatcgatgagttccaacatttggtggaagaaaggtcaaatcgggttcttacccaagtaggtaattggctaaaaatgatacttaacaaaacgaaatgtccaattgttatatttggtatgccatactcaaaagttgtactgcaagcaaactcgcaacttcacgggcgattttccattcaggttgaactgcgcccctttagctaccagggaggtagaggtgtatttaaaacttttttggaataccttgataaagccctaccttttgaaaaacaggctggcttagccaacgaaagtttgcagaaaaaattgtatgcattctctcagggaaacatgcgttcgttgagaaaccttatttatcaagcatctatcgaagcaattgataatcagcatgagacgataaccgaagaagatttcgtttttgcatcgaagttgacatcgggcgataaacccaactcatggaaaaatccttttgaggagggtgttgaggtaacagaagatatgttacgaccgccaccaaaagatattggttgggaggactatttgagacattcaaccccgagagtgagtaaaccaggtagaaataaaaactttttcgaataacctaggctgctgcgctgctgccaccgctgagcaataactagcataaccccttggggcctctaaacgggtcttgaggggttttttgctgaaacctcaggcatttgagaagcacacggtcacactgcttccggtagtcaataaaccggtaaaccagcaatagacataagcggctatttaacgaccctgccctgaaccgacgaccgggtcatcgtggccggatcttgcggcccctcggcttgaacgaattgttagacattatttgccgactaccttggtgatctcgcctttcacgtagtggacaaattcttccaactgatctgcgcgcgaggccaagcgatcttcttcttgtccaagataagcctgtctagcttcaagtatgacgggctgatactgggccggcaggcgctccattgcccagtcggcagcgacatccttcggcgcgattttgccggttactgcgctgtaccaaatgcgggacaacgtaagcactacatttcgctcatcgccagcccagtcgggcggcgagttccatagcgttaaggtttcatttagcgcctcaaatagatcctgttcaggaaccggatcaaagagttcctccgccgctggacctaccaaggcaacgctatgttctcttgcttttgtcagcaagatagccagatcaatgtcgatcgtggctggctcgaagatacctgcaagaatgtcattgcgctgccattctccaaattgcagttcgcgcttagctggataacgccacggaatgatgtcgtcgtgcacaacaatggtgacttctacagcgcggagaatctcgctctctccaggggaagccgaagtttccaaaaggtcgttgatcaaagctcgccgcgttgtttcatcaagccttacggtcaccgtaaccagcaaatcaatatcactgtgtggcttcaggccgccatccactgcggagccgtacaaatgtacggccagcaacgtcggttcgagatggcgctcgatgacgccaactacctctgatagttgagtcgatacttcggcgatcaccgcttccctcatactcttcctttttcaatattattgaagcatttatcagggttattgtctcatgagcggatacatatttgaatgtatttagaaaaataaacaaatagctagctcactcggtcgctacgctccgggcgtgagactgcggcgggcgctgcggacacatacaaagttacccacagattccgtggataagcaggggactaacatgtgaggcaaaacagcagggccgcgccggtggcgtttttccataggctccgccctcctgccagagttcacataaacagacgcttttccggtgcatctgtgggagccgtgaggctcaaccatgaatctgacagtacgggcgaaacccgacaggacttaaagatccccaccgtttccggcgggtcgctccctcttgcgctctcctgttccgaccctgccgtttaccggatacctgttccgcctttctcccttacgggaagtgtggcgctttctcatagctcacacactggtatctcggctcggtgtaggtcgttcgctccaagctgggctgtaagcaagaactccccgttcagcccgactgctgcgccttatccggtaactgttcacttgagtccaacccggaaaagcacggtaaaacgccactggcagcagccattggtaactgggagttcgcagaggatttgtttagctaaacacgcggttgctcttgaagtgtgcgccaaagtccggctacactggaaggacagatttggttgctgtgctctgcgaaagccagttaccacggttaagcagttccccaactgacttaaccttcgatcaaaccacctccccaggtggttttttcgtttacagggcaaaagattacgcgcagaaaaaaaggatctcaagaagatcctttgatc

SEQ ID NO: 5160 - DNA, 1838 bp, synthetic construct
  source 1..1838: mol_type = other DNA
taggcatgctagcgcagaaacgtcctagaagatgccaggaggatacttagcagagagacaataaggccggagcgaagccgtttttccataggctccgcccccctgacgaacatcacgaaatctgacgctcaaatcagtggtggcgaaacccgacaggactataaagataccaggcgtttccccctgatggctccctcttgcgctctcctgttcccgtcctgcggcgtccgtgttgtggtggaggctttacccaaatcaccacgtcccgttccgtgtagacagttcgctccaagctgggctgtgtgcaagaaccccccgttcagcccgactgctgcgccttatccggtaactatcatcttgagtccaacccggaaagacacgacaaaacgccactggcagcagccattggtaactgagaattagtggatttagatatcgagagtcttgaagtggtggcctaacagaggctacactgaaaggacagtatttggtatctgcgctccactaaagccagttaccaggttaagcagttccccaactgacttaaccttcgatcaaaccgcctccccaggcggttttttcgtttacagagcaggagattacgacgatcgtaaaaggatctcaagaagatcctttacggattcccgacaccatcactctagaccagtacagcgcggctgaaatcatcattaaagcgagtggcaacatggaaatcgctgatttgtgtagtcggtttatgcagcaacgagacgtcacgaccggtaaaccagcaatagacataagcggctatttaacgaccctgccctgaaccgacgacaagctgacgaccgggtctccgcaagtggcacttttcggggaaatgtgcgcggaacccctatttgtttatttttctaaatacattcaaatatgtatccgctcatgaattaattcttagaaaaactcatcgagcatcaaatgaaactgcaatttattcatatcaggattatcaataccatatttttgaaaaagccgtttctgtaatgaaggagaaaactcaccgaggcagttccataggatggcaagatcctggtatcggtctgcgattccgactcgtccaacatcaatacaacctattaatttcccctcgtcaaaaataaggttatcaagtgagaaatcaccatgagtgacgactgaatccggtgagaatggcaaaagtttatgcatttctttccagacttgttcaacaggccagccattacgctcgtcatcaaaatcactcgcatcaaccaaaccgttattcattcgtgattgcgcctgagcgagacgaaatacgcggtcgctgttaaaaggacaattacaaacaggaatcgaatgcaaccggcgcaggaacactgccagcgcatcaacaatattttcacctgaatcaggatattcttctaatacctggaatgctgttttcccggggatcgcagtggtgagtaaccatgcatcatcaggagtacggataaaatgcttgatggtcggaagaggcataaattccgtcagccagtttagtctgaccatctcatctgtaacatcattggcaacgctacctttgccatgtttcagaaacaactctggcgcatcgggcttcccatacaatcgatagattgtcgcacctgattgcccgacattatcgcgagcccatttatacccatataaatcagcatccatgttggaatttaatcgcggcctagagcaagacgtttcccgttgaatatggctcatactcttcctttttcaatattattgaagcatttatcagggttattgtctcatgagcggatacatatttgaatgtatttagaaaaataaacaaa

SEQ ID NO: 5161 - DNA, 1838 bp, synthetic construct
  source 1..1838: mol_type = other DNA
taggcatgctagcgcagaaacgtcctagaagatgccaggaggatacttagcagagagacaataaggccggagcgaagccgtttttccataggctccgcccccctgacgaacatcacgaaatctgacgctcaaatcagtggtggcgaaacccgacaggactataaagataccaggcgtttccccctgatggctccctcttgcgctctcctgttcccgtcctgcggcgtccgtgttgtggtggaggctttacccaaatcaccacgtcccgttccgtgtagacagttcgctccaagctgggctgtgtgcaagaaccccccgttcagcccgactgctgcgccttatccggtaactatcatcttgagtccaacccggaaagacacgacaaaacgccactggcagcagccattggtaactgagaattagtggatttagatatcgagagtcttgaagtggtggcctaacagaggctacactgaaaggacagtatttggtatctgcgctccactaaagccagttaccaggttaagcagttccccaactgacttaaccttcgatcaaaccgcctccccaggcggttttttcgtttacagagcaggagattacgacgatcgtaaaaggatctcaagaagatcctttacggattcccgacaccatcactctagaccagtacagcgcggctgaaatcatcattaaagcgcgtcagcagttgttttttatcgccaatccacatctgtgaaagaaagcctgactggcggttaccggtaaaccagcaatagacataagcggctatttaacgaccctgccctgaaccgacgacaagctgacgaccgggtctccgcaagtggcacttttcggggaaatgtgcgcggaacccctatttgtttatttttctaaatacattcaaatatgtatccgctcatgaattaattcttagaaaaactcatcgagcatcaaatgaaactgcaatttattcatatcaggattatcaataccatatttttgaaaaagccgtttctgtaatgaaggagaaaactcaccgaggcagttccataggatggcaagatcctggtatcggtctgcgattccgactcgtccaacatcaatacaacctattaatttcccctcgtcaaaaataaggttatcaagtgagaaatcaccatgagtgacgactgaatccggtgagaatggcaaaagtttatgcatttctttccagacttgttcaacaggccagccattacgctcgtcatcaaaatcactcgcatcaaccaaaccgttattcattcgtgattgcgcctgagcgagacgaaatacgcggtcgctgttaaaaggacaattacaaacaggaatcgaatgcaaccggcgcaggaacactgccagcgcatcaacaatattttcacctgaatcaggatattcttctaatacctggaatgctgttttcccggggatcgcagtggtgagtaaccatgcatcatcaggagtacggataaaatgcttgatggtcggaagaggcataaattccgtcagccagtttagtctgaccatctcatctgtaacatcattggcaacgctacctttgccatgtttcagaaacaactctggcgcatcgggcttcccatacaatcgatagattgtcgcacctgattgcccgacattatcgcgagcccatttatacccatataaatcagcatccatgttggaatttaatcgcggcctagagcaagacgtttcccgttgaatatggctcatactcttcctttttcaatattattgaagcatttatcagggttattgtctcatgagcggatacatatttgaatgtatttagaaaaataaacaaa

SEQ ID NO: 5162 - DNA, 1838 bp, synthetic construct
  source 1..1838: mol_type = other DNA
taggcatgctagcgcagaaacgtcctagaagatgccaggaggatacttagcagagagacaataaggccggagcgaagccgtttttccataggctccgcccccctgacgaacatcacgaaatctgacgctcaaatcagtggtggcgaaacccgacaggactataaagataccaggcgtttccccctgatggctccctcttgcgctctcctgttcccgtcctgcggcgtccgtgttgtggtggaggctttacccaaatcaccacgtcccgttccgtgtagacagttcgctccaagctgggctgtgtgcaagaaccccccgttcagcccgactgctgcgccttatccggtaactatcatcttgagtccaacccggaaagacacgacaaaacgccactggcagcagccattggtaactgagaattagtggatttagatatcgagagtcttgaagtggtggcctaacagaggctacactgaaaggacagtatttggtatctgcgctccactaaagccagttaccaggttaagcagttccccaactgacttaaccttcgatcaaaccgcctccccaggcggttttttcgtttacagagcaggagattacgacgatcgtaaaaggatctcaagaagatcctttacggattcccgacaccatcactctagaccagtacagcgcggctgaaatcatcattaaagcggcgtcccgcagcgcagaccgttttcgctcgggaagacgtacggggtatacatgtctgacaaccggtaaaccagcaatagacataagcggctatttaacgaccctgccctgaaccgacgacaagctgacgaccgggtctccgcaagtggcacttttcggggaaatgtgcgcggaacccctatttgtttatttttctaaatacattcaaatatgtatccgctcatgaattaattcttagaaaaactcatcgagcatcaaatgaaactgcaatttattcatatcaggattatcaataccatatttttgaaaaagccgtttctgtaatgaaggagaaaactcaccgaggcagttccataggatggcaagatcctggtatcggtctgcgattccgactcgtccaacatcaatacaacctattaatttcccctcgtcaaaaataaggttatcaagtgagaaatcaccatgagtgacgactgaatccggtgagaatggcaaaagtttatgcatttctttccagacttgttcaacaggccagccattacgctcgtcatcaaaatcactcgcatcaaccaaaccgttattcattcgtgattgcgcctgagcgagacgaaatacgcggtcgctgttaaaaggacaattacaaacaggaatcgaatgcaaccggcgcaggaacactgccagcgcatcaacaatattttcacctgaatcaggatattcttctaatacctggaatgctgttttcccggggatcgcagtggtgagtaaccatgcatcatcaggagtacggataaaatgcttgatggtcggaagaggcataaattccgtcagccagtttagtctgaccatctcatctgtaacatcattggcaacgctacctttgccatgtttcagaaacaactctggcgcatcgggcttcccatacaatcgatagattgtcgcacctgattgcccgacattatcgcgagcccatttatacccatataaatcagcatccatgttggaatttaatcgcggcctagagcaagacgtttcccgttgaatatggctcatactcttcctttttcaatattattgaagcatttatcagggttattgtctcatgagcggatacatatttgaatgtatttagaaaaataaacaaa

SEQ ID NO: 5163 - DNA, 1838 bp, synthetic construct
  source 1..1838: mol_type = other DNA
taggcatgctagcgcagaaacgtcctagaagatgccaggaggatacttagcagagagacaataaggccggagcgaagccgtttttccataggctccgcccccctgacgaacatcacgaaatctgacgctcaaatcagtggtggcgaaacccgacaggactataaagataccaggcgtttccccctgatggctccctcttgcgctctcctgttcccgtcctgcggcgtccgtgttgtggtggaggctttacccaaatcaccacgtcccgttccgtgtagacagttcgctccaagctgggctgtgtgcaagaaccccccgttcagcccgactgctgcgccttatccggtaactatcatcttgagtccaacccggaaagacacgacaaaacgccactggcagcagccattggtaactgagaattagtggatttagatatcgagagtcttgaagtggtggcctaacagaggctacactgaaaggacagtatttggtatctgcgctccactaaagccagttaccaggttaagcagttccccaactgacttaaccttcgatcaaaccgcctccccaggcggttttttcgtttacagagcaggagattacgacgatcgtaaaaggatctcaagaagatcctttacggattcccgacaccatcactctagaccagtacagcgcggctgaaatcatcattaaagcggatttccttacgcgaaatacgggcagacatggcctgcccggttattattatttttgacacaccggtaaaccagcaatagacataagcggctatttaacgaccctgccctgaaccgacgacaagctgacgaccgggtctccgcaagtggcacttttcggggaaatgtgcgcggaacccctatttgtttatttttctaaatacattcaaatatgtatccgctcatgaattaattcttagaaaaactcatcgagcatcaaatgaaactgcaatttattcatatcaggattatcaataccatatttttgaaaaagccgtttctgtaatgaaggagaaaactcaccgaggcagttccataggatggcaagatcctggtatcggtctgcgattccgactcgtccaacatcaatacaacctattaatttcccctcgtcaaaaataaggttatcaagtgagaaatcaccatgagtgacgactgaatccggtgagaatggcaaaagtttatgcatttctttccagacttgttcaacaggccagccattacgctcgtcatcaaaatcactcgcatcaaccaaaccgttattcattcgtgattgcgcctgagcgagacgaaatacgcggtcgctgttaaaaggacaattacaaacaggaatcgaatgcaaccggcgcaggaacactgccagcgcatcaacaatattttcacctgaatcaggatattcttctaatacctggaatgctgttttcccggggatcgcagtggtgagtaaccatgcatcatcaggagtacggataaaatgcttgatggtcggaagaggcataaattccgtcagccagtttagtctgaccatctcatctgtaacatcattggcaacgctacctttgccatgtttcagaaacaactctggcgcatcgggcttcccatacaatcgatagattgtcgcacctgattgcccgacattatcgcgagcccatttatacccatataaatcagcatccatgttggaatttaatcgcggcctagagcaagacgtttcccgttgaatatggctcatactcttcctttttcaatattattgaagcatttatcagggttattgtctcatgagcggatacatatttgaatgtatttagaaaaataaacaaa

SEQ ID NO: 5164 - DNA, 1838 bp, synthetic construct
  source 1..1838: mol_type = other DNA
taggcatgctagcgcagaaacgtcctagaagatgccaggaggatacttagcagagagacaataaggccggagcgaagccgtttttccataggctccgcccccctgacgaacatcacgaaatctgacgctcaaatcagtggtggcgaaacccgacaggactataaagataccaggcgtttccccctgatggctccctcttgcgctctcctgttcccgtcctgcggcgtccgtgttgtggtggaggctttacccaaatcaccacgtcccgttccgtgtagacagttcgctccaagctgggctgtgtgcaagaaccccccgttcagcccgactgctgcgccttatccggtaactatcatcttgagtccaacccggaaagacacgacaaaacgccactggcagcagccattggtaactgagaattagtggatttagatatcgagagtcttgaagtggtggcctaacagaggctacactgaaaggacagtatttggtatctgcgctccactaaagccagttaccaggttaagcagttccccaactgacttaaccttcgatcaaaccgcctccccaggcggttttttcgtttacagagcaggagattacgacgatcgtaaaaggatctcaagaagatcctttacggattcccgacaccatcactctagaccagcggtgcacgggtgaactgatcgcgcagcggcgtcagcagttgttttttatcgccaatccacatctgtgaaagaaagcctgactggcggttaccggtaaaccagcaatagacataagcggctatttaacgaccctgccctgaaccgacgacaagctgacgaccgggtctccgcaagtggcacttttcggggaaatgtgcgcggaacccctatttgtttatttttctaaatacattcaaatatgtatccgctcatgaattaattcttagaaaaactcatcgagcatcaaatgaaactgcaatttattcatatcaggattatcaataccatatttttgaaaaagccgtttctgtaatgaaggagaaaactcaccgaggcagttccataggatggcaagatcctggtatcggtctgcgattccgactcgtccaacatcaatacaacctattaatttcccctcgtcaaaaataaggttatcaagtgagaaatcaccatgagtgacgactgaatccggtgagaatggcaaaagtttatgcatttctttccagacttgttcaacaggccagccattacgctcgtcatcaaaatcactcgcatcaaccaaaccgttattcattcgtgattgcgcctgagcgagacgaaatacgcggtcgctgttaaaaggacaattacaaacaggaatcgaatgcaaccggcgcaggaacactgccagcgcatcaacaatattttcacctgaatcaggatattcttctaatacctggaatgctgttttcccggggatcgcagtggtgagtaaccatgcatcatcaggagtacggataaaatgcttgatggtcggaagaggcataaattccgtcagccagtttagtctgaccatctcatctgtaacatcattggcaacgctacctttgccatgtttcagaaacaactctggcgcatcgggcttcccatacaatcgatagattgtcgcacctgattgcccgacattatcgcgagcccatttatacccatataaatcagcatccatgttggaatttaatcgcggcctagagcaagacgtttcccgttgaatatggctcatactcttcctttttcaatattattgaagcatttatcagggttattgtctcatgagcggatacatatttgaatgtatttagaaaaataaacaaa

SEQ ID NO: 5165 - DNA, 1838 bp, synthetic construct
  source 1..1838: mol_type = other DNA
taggcatgctagcgcagaaacgtcctagaagatgccaggaggatacttagcagagagacaataaggccggagcgaagccgtttttccataggctccgcccccctgacgaacatcacgaaatctgacgctcaaatcagtggtggcgaaacccgacaggactataaagataccaggcgtttccccctgatggctccctcttgcgctctcctgttcccgtcctgcggcgtccgtgttgtggtggaggctttacccaaatcaccacgtcccgttccgtgtagacagttcgctccaagctgggctgtgtgcaagaaccccccgttcagcccgactgctgcgccttatccggtaactatcatcttgagtccaacccggaaagacacgacaaaacgccactggcagcagccattggtaactgagaattagtggatttagatatcgagagtcttgaagtggtggcctaacagaggctacactgaaaggacagtatttggtatctgcgctccactaaagccagttaccaggttaagcagttccccaactgacttaaccttcgatcaaaccgcctccccaggcggttttttcgtttacagagcaggagattacgacgatcgtaaaaggatctcaagaagatcctttacggattcccgacaccatcactctagaccagcggtgcacgggtgaactgatcgcgcagcggagtggcaacatggaaatcgctgatttgtgtagtcggtttatgcagcaacgagacgtcacgaccggtaaaccagcaatagacataagcggctatttaacgaccctgccctgaaccgacgacaagctgacgaccgggtctccgcaagtggcacttttcggggaaatgtgcgcggaacccctatttgtttatttttctaaatacattcaaatatgtatccgctcatgaattaattcttagaaaaactcatcgagcatcaaatgaaactgcaatttattcatatcaggattatcaataccatatttttgaaaaagccgtttctgtaatgaaggagaaaactcaccgaggcagttccataggatggcaagatcctggtatcggtctgcgattccgactcgtccaacatcaatacaacctattaatttcccctcgtcaaaaataaggttatcaagtgagaaatcaccatgagtgacgactgaatccggtgagaatggcaaaagtttatgcatttctttccagacttgttcaacaggccagccattacgctcgtcatcaaaatcactcgcatcaaccaaaccgttattcattcgtgattgcgcctgagcgagacgaaatacgcggtcgctgttaaaaggacaattacaaacaggaatcgaatgcaaccggcgcaggaacactgccagcgcatcaacaatattttcacctgaatcaggatattcttctaatacctggaatgctgttttcccggggatcgcagtggtgagtaaccatgcatcatcaggagtacggataaaatgcttgatggtcggaagaggcataaattccgtcagccagtttagtctgaccatctcatctgtaacatcattggcaacgctacctttgccatgtttcagaaacaactctggcgcatcgggcttcccatacaatcgatagattgtcgcacctgattgcccgacattatcgcgagcccatttatacccatataaatcagcatccatgttggaatttaatcgcggcctagagcaagacgtttcccgttgaatatggctcatactcttcctttttcaatattattgaagcatttatcagggttattgtctcatgagcggatacatatttgaatgtatttagaaaaataaacaaa

SEQ ID NO: 5166 - DNA, 1838 bp, synthetic construct
  source 1..1838: mol_type = other DNA
taggcatgctagcgcagaaacgtcctagaagatgccaggaggatacttagcagagagacaataaggccggagcgaagccgtttttccataggctccgcccccctgacgaacatcacgaaatctgacgctcaaatcagtggtggcgaaacccgacaggactataaagataccaggcgtttccccctgatggctccctcttgcgctctcctgttcccgtcctgcggcgtccgtgttgtggtggaggctttacccaaatcaccacgtcccgttccgtgtagacagttcgctccaagctgggctgtgtgcaagaaccccccgttcagcccgactgctgcgccttatccggtaactatcatcttgagtccaacccggaaagacacgacaaaacgccactggcagcagccattggtaactgagaattagtggatttagatatcgagagtcttgaagtggtggcctaacagaggctacactgaaaggacagtatttggtatctgcgctccactaaagccagttaccaggttaagcagttccccaactgacttaaccttcgatcaaaccgcctccccaggcggttttttcgtttacagagcaggagattacgacgatcgtaaaaggatctcaagaagatcctttacggattcccgacaccatcactctagaccgcgccactggtgtgggccataattcaattcgcgcgtcccgcagcgcagaccgttttcgctcgggaagacgtacggggtatacatgtctgacaaccggtaaaccagcaatagacataagcggctatttaacgaccctgccctgaaccgacgacaagctgacgaccgggtctccgcaagtggcacttttcggggaaatgtgcgcggaacccctatttgtttatttttctaaatacattcaaatatgtatccgctcatgaattaattcttagaaaaactcatcgagcatcaaatgaaactgcaatttattcatatcaggattatcaataccatatttttgaaaaagccgtttctgtaatgaaggagaaaactcaccgaggcagttccataggatggcaagatcctggtatcggtctgcgattccgactcgtccaacatcaatacaacctattaatttcccctcgtcaaaaataaggttatcaagtgagaaatcaccatgagtgacgactgaatccggtgagaatggcaaaagtttatgcatttctttccagacttgttcaacaggccagccattacgctcgtcatcaaaatcactcgcatcaaccaaaccgttattcattcgtgattgcgcctgagcgagacgaaatacgcggtcgctgttaaaaggacaattacaaacaggaatcgaatgcaaccggcgcaggaacactgccagcgcatcaacaatattttcacctgaatcaggatattcttctaatacctggaatgctgttttcccggggatcgcagtggtgagtaaccatgcatcatcaggagtacggataaaatgcttgatggtcggaagaggcataaattccgtcagccagtttagtctgaccatctcatctgtaacatcattggcaacgctacctttgccatgtttcagaaacaactctggcgcatcgggcttcccatacaatcgatagattgtcgcacctgattgcccgacattatcgcgagcccatttatacccatataaatcagcatccatgttggaatttaatcgcggcctagagcaagacgtttcccgttgaatatggctcatactcttcctttttcaatattattgaagcatttatcagggttattgtctcatgagcggatacatatttgaatgtatttagaaaaataaacaaa

SEQ ID NO: 5167 - DNA, 1838 bp, synthetic construct
  source 1..1838: mol_type = other DNA
taggcatgctagcgcagaaacgtcctagaagatgccaggaggatacttagcagagagacaataaggccggagcgaagccgtttttccataggctccgcccccctgacgaacatcacgaaatctgacgctcaaatcagtggtggcgaaacccgacaggactataaagataccaggcgtttccccctgatggctccctcttgcgctctcctgttcccgtcctgcggcgtccgtgttgtggtggaggctttacccaaatcaccacgtcccgttccgtgtagacagttcgctccaagctgggctgtgtgcaagaaccccccgttcagcccgactgctgcgccttatccggtaactatcatcttgagtccaacccggaaagacacgacaaaacgccactggcagcagccattggtaactgagaattagtggatttagatatcgagagtcttgaagtggtggcctaacagaggctacactgaaaggacagtatttggtatctgcgctccactaaagccagttaccaggttaagcagttccccaactgacttaaccttcgatcaaaccgcctccccaggcggttttttcgtttacagagcaggagattacgacgatcgtaaaaggatctcaagaagatcctttacggattcccgacaccatcactctagaccgcgccactggtgtgggccataattcaattcgcagtggcaacatggaaatcgctgatttgtgtagtcggtttatgcagcaacgagacgtcacgaccggtaaaccagcaatagacataagcggctatttaacgaccctgccctgaaccgacgacaagctgacgaccgggtctccgcaagtggcacttttcggggaaatgtgcgcggaacccctatttgtttatttttctaaatacattcaaatatgtatccgctcatgaattaattcttagaaaaactcatcgagcatcaaatgaaactgcaatttattcatatcaggattatcaataccatatttttgaaaaagccgtttctgtaatgaaggagaaaactcaccgaggcagttccataggatggcaagatcctggtatcggtctgcgattccgactcgtccaacatcaatacaacctattaatttcccctcgtcaaaaataaggttatcaagtgagaaatcaccatgagtgacgactgaatccggtgagaatggcaaaagtttatgcatttctttccagacttgttcaacaggccagccattacgctcgtcatcaaaatcactcgcatcaaccaaaccgttattcattcgtgattgcgcctgagcgagacgaaatacgcggtcgctgttaaaaggacaattacaaacaggaatcgaatgcaaccggcgcaggaacactgccagcgcatcaacaatattttcacctgaatcaggatattcttctaatacctggaatgctgttttcccggggatcgcagtggtgagtaaccatgcatcatcaggagtacggataaaatgcttgatggtcggaagaggcataaattccgtcagccagtttagtctgaccatctcatctgtaacatcattggcaacgctacctttgccatgtttcagaaacaactctggcgcatcgggcttcccatacaatcgatagattgtcgcacctgattgcccgacattatcgcgagcccatttatacccatataaatcagcatccatgttggaatttaatcgcggcctagagcaagacgtttcccgttgaatatggctcatactcttcctttttcaatattattgaagcatttatcagggttattgtctcatgagcggatacatatttgaatgtatttagaaaaataaacaaa

SEQ ID NO: 5168 - DNA, 1838 bp, synthetic construct
  source 1..1838: mol_type = other DNA
tgcaaccggcgcaggaacactgccagcgcatcaacaatattttcacctgaatcaggatattcttctaatacctggaatgctgttttcccggggatcgcagtggtgagtaaccatgcatcatcaggagtacggataaaatgcttgatggtcggaagaggcataaattccgtcagccagtttagtctgaccatctcatctgtaacatcattggcaacgctacctttgccatgtttcagaaacaactctggcgcatcgggcttcccatacaatcgatagattgtcgcacctgattgcccgacattatcgcgagcccatttatacccatataaatcagcatccatgttggaatttaatcgcggcctagagcaagacgtttcccgttgaatatggctcatactcttcctttttcaatattattgaagcatttatcagggttattgtctcatgagcggatacatatttgaatgtatttagaaaaataaacaaataggcatgctagcgcagaaacgtcctagaagatgccaggaggatacttagcagagagacaataaggccggagcgaagccgtttttccataggctccgcccccctgacgaacatcacgaaatctgacgctcaaatcagtggtggcgaaacccgacaggactataaagataccaggcgtttccccctgatggctccctcttgcgctctcctgttcccgtcctgcggcgtccgtgttgtggtggaggctttacccaaatcaccacgtcccgttccgtgtagacagttcgctccaagctgggctgtgtgcaagaaccccccgttcagcccgactgctgcgccttatccggtaactatcatcttgagtccaacccggaaagacacgacaaaacgccactggcagcagccattggtaactgagaattagtggatttagatatcgagagtcttgaagtggtggcctaacagaggctacactgaaaggacagtatttggtatctgcgctccactaaagccagttaccaggttaagcagttccccaactgacttaaccttcgatcaaaccgcctccccaggcggttttttcgtttacagagcaggagattacgacgatcgtaaaaggatctcaagaagatcctttacggattcccgacaccatcactctagaccaaaagtttgtgttttttaaatagtacataatggatttccttacgcgaaatacgggcagacatggcctgcccggttattattatttttgacacaccggtaaaccagcaatagacataagcggctatttaacgaccctgccctgaaccgacgacaagctgacgaccgggtctccgcaagtggcacttttcggggaaatgtgcgcggaacccctatttgtttatttttctaaatacattcaaatatgtatccgctcatgaattaattcttagaaaaactcatcgagcatcaaatgaaactgcaatttattcatatcaggattatcaataccatatttttgaaaaagccgtttctgtaatgaaggagaaaactcaccgaggcagttccataggatggcaagatcctggtatcggtctgcgattccgactcgtccaacatcaatacaacctattaatttcccctcgtcaaaaataaggttatcaagtgagaaatcaccatgagtgacgactgaatccggtgagaatggcaaaagtttatgcatttctttccagacttgttcaacaggccagccattacgctcgtcatcaaaatcactcgcatcaaccaaaccgttattcattcgtgattgcgcctgagcgagacgaaatacgcggtcgctgttaaaaggacaattacaaacaggaatcgaa

SEQ ID NO: 5169 - DNA, 1838 bp, synthetic construct
  source 1..1838: mol_type = other DNA
taggcatgctagcgcagaaacgtcctagaagatgccaggaggatacttagcagagagacaataaggccggagcgaagccgtttttccataggctccgcccccctgacgaacatcacgaaatctgacgctcaaatcagtggtggcgaaacccgacaggactataaagataccaggcgtttccccctgatggctccctcttgcgctctcctgttcccgtcctgcggcgtccgtgttgtggtggaggctttacccaaatcaccacgtcccgttccgtgtagacagttcgctccaagctgggctgtgtgcaagaaccccccgttcagcccgactgctgcgccttatccggtaactatcatcttgagtccaacccggaaagacacgacaaaacgccactggcagcagccattggtaactgagaattagtggatttagatatcgagagtcttgaagtggtggcctaacagaggctacactgaaaggacagtatttggtatctgcgctccactaaagccagttaccaggttaagcagttccccaactgacttaaccttcgatcaaaccgcctccccaggcggttttttcgtttacagagcaggagattacgacgatcgtaaaaggatctcaagaagatcctttacggattcccgacaccatcactctagaccaaaagtttgtgttttttaaatagtacataatgagtggcaacatggaaatcgctgatttgtgtagtcggtttatgcagcaacgagacgtcacgaccggtaaaccagcaatagacataagcggctatttaacgaccctgccctgaaccgacgacaagctgacgaccgggtctccgcaagtggcacttttcggggaaatgtgcgcggaacccctatttgtttatttttctaaatacattcaaatatgtatccgctcatgaattaattcttagaaaaactcatcgagcatcaaatgaaactgcaatttattcatatcaggattatcaataccatatttttgaaaaagccgtttctgtaatgaaggagaaaactcaccgaggcagttccataggatggcaagatcctggtatcggtctgcgattccgactcgtccaacatcaatacaacctattaatttcccctcgtcaaaaataaggttatcaagtgagaaatcaccatgagtgacgactgaatccggtgagaatggcaaaagtttatgcatttctttccagacttgttcaacaggccagccattacgctcgtcatcaaaatcactcgcatcaaccaaaccgttattcattcgtgattgcgcctgagcgagacgaaatacgcggtcgctgttaaaaggacaattacaaacaggaatcgaatgcaaccggcgcaggaacactgccagcgcatcaacaatattttcacctgaatcaggatattcttctaatacctggaatgctgttttcccggggatcgcagtggtgagtaaccatgcatcatcaggagtacggataaaatgcttgatggtcggaagaggcataaattccgtcagccagtttagtctgaccatctcatctgtaacatcattggcaacgctacctttgccatgtttcagaaacaactctggcgcatcgggcttcccatacaatcgatagattgtcgcacctgattgcccgacattatcgcgagcccatttatacccatataaatcagcatccatgttggaatttaatcgcggcctagagcaagacgtttcccgttgaatatggctcatactcttcctttttcaatattattgaagcatttatcagggttattgtctcatgagcggatacatatttgaatgtatttagaaaaataaacaaa

SEQ ID NO: 5170 - DNA, 10925 bp, synthetic construct
  source 1..10925: mol_type = other DNA
gcgctgcggacacatacaaagttacccacagattccgtggataagcaggggactaacatgtgaggcaaaacagcagggccgcgccggtggcgtttttccataggctccgccctcctgccagagttcacataaacagacgcttttccggtgcatctgtgggagccgtgaggctcaaccatgaatctgacagtacgggcgaaacccgacaggacttaaagatccccaccgtttccggcgggtcgctccctcttgcgctctcctgttccgaccctgccgtttaccggatacctgttccgcctttctcccttacgggaagtgtggcgctttctcatagctcacacactggtatctcggctcggtgtaggtcgttcgctccaagctgggctgtaagcaagaactccccgttcagcccgactgctgcgccttatccggtaactgttcacttgagtccaacccggaaaagcacggtaaaacgccactggcagcagccattggtaactgggagttcgcagaggatttgtttagctaaacacgcggttgctcttgaagtgtgcgccaaagtccggctacactggaaggacagatttggttgctgtgctctgcgaaagccagttaccacggttaagcagttccccaactgacttaaccttcgatcaaaccacctccccaggtggttttttcgtttacagggcaaaagattacgcgcagaaaaaaaggatctcaagaagatcctttgatcttttctactgaaccgctctagatttcagtgcaatttatctcttcaaatgtagcacctgaagtcagccccatacgatataagttgtaattctcatgttagtcatgccccgcgcccaccggaaggagctgactgggttgaaggctctcaagggcatcggtcgagatcccggtgcctaatgagtgagctaacttaccgtattaccgcctttgagtgagctgataccgctcgccgcagccgaacgaccgagcgcagcgagtcagtgagcgaggacacaagctttgacagctagctcagtcctaggtataatactagcgtcgacgtggagatataccatgggtgaactgccgagtaggtagctgataacagtacagcgcggctgaaatcatcattaaagcggtgaactgccgagtaggtagctgataacggatccgaattcgagcgaaggagatatacatatgtttttgcaaagacctaaaccttacagcgatgaaagtttagaaagtttctttatccgagtggctaacaaaaatggctacggtgatgtccatcgcttcctagaagccactaaacgattccttcaagacattgaccataatggctatcaaacctttccgactgatataactcggataaacccatactcagctaaaaacagttccagcgcacgaactgcgtcattcctgaaacttgcacaattgacatttaatgaaccgccagagctacttgggttggcaattaacagaacaaacatgaaatactcgccgtcaactagcgcggttgttagaggtgcagaagtctttcctcgcagtttactacggacgcactccatcccctgctgtcctttgtgtctgcgagaaaatggctacgcctcctacctttggcactttcaggggtacgaatactgccacagccataacgtacctttaattaccacttgtagctgtggtaaggagtttgactaccgagtatctgggttaaagggcatttgctgcaaatgcaaggagcctatcaccttaaccagcagggagaacggtcatgaggcagcgtgtactgtttcaaactggcttgctggccatgaatctaaacctctgccaaatcttcctaaaagctaccgatggggtttagttcattggtggatgggtattaaagatagcgagttcgatcacttttcgttcgttcaatttttctcaaactggccaaggtcattccactcgataatcgaagatgaagtagagttcaaccttgagcatgctgttgtcagcacgtctgaattacgactaaaagatcttcttggtcgattgtttttcggttcaattcggttacctgagcggaatcttcaacacaatatcatccttggtgagcttctctgctatttagaaaatcgtttatggcaagacaagggattaatcgccaacctcaaaatgaacgcgttagaggcgactgtaatgttaaattgtagcctcgatcagattgcatcaatggttgaacaacgcatcttgaagccaaatcgaaaaagcaagcccaacagccctcttgatgttaccgattatctatttcatttcggcgatattttctgtctttggttagctgagttccaaagcgatgagtttaaccgttcgttttatgtgtcgaggtggtaaatgcaaactctgaaagaactaatcgcatccaatcctgacgacttaacaactgaacttaagagagcatttcgtccactcacaccgcatattgcaattgatggtaatgaacttgacgcactgacgatattagtcaatttaaccgataagactgatgatcagaaagacctgctcgatcgagccaaatgcaagcaaaaacttcgagatgaaaaatggtgggctagctgcataaattgcgttaattacagacaaagccataacccaaaattcccggatatacgttctgaaggcgtgattcgaacccaagccctgggtgaattaccgagtttcctactctcgtcctcaaaaatcccaccataccattggtcatatagccatgattcaaaatacgtcaacaaaagcgcattcctcaccaatgagttttgttgggatggtgagatctcatgtttgggtgagcttcttaaagatgcagatcacccactttggaatactttgaaaaagttaggttgttctcaaaaaacttgcaaagcaatggcaaaacaactagctgatattactctcacgactatcaatgtcacactcgcaccaaattacctgactcaaatatctctccccgatagtgatacatcctacatttcactctctcctgttgcatcgctatcgatgcaaagccactttcatcagaggctccaagatgaaaatcggcatagcgcgataacgcggtttagccgaactaccaacatgggggtcactgcgatgacatgtggcggcgcatttagaatgttaaagtctggcgctaagttttccagcccccctcatcaccgattaaacagtaaacgaagttggttgacgtcagagcatgttcagtcattaaaacagtaccagcgcctcaacaaaagcctcatacctgaaaactctcggattgcactccgtagaaaatacaaaatcgagcttcaaaatatggtcagatcttggtttgcaatgcaagaccatacccttgattcgaacatacttatccaacatttgaatcatgacctatcttacttaggagccacaaaacgttttgcatacgatccagcgatgaccaagctctttactgagcttttgaaacgagagttatcaaattcaatcaataatggtgagcaacacactaatggatcgtttttagtcctaccgaatatcagggtttgtggcgcaacagctttaagctccccggtaacggtggggattccatcacttacagctttctttggcttcgttcacgcatttgaacggaatataaatcgcaccacctcatcgtttcgtgttgaatcctttgcgatatgcgtccatcaactacatgtcgagaagcgaggtttgacagcagagtttgtggaaaaaggcgacgggactatatccgctcccgcgacccgggatgactggcagtgtgatgtcgtatttagccttattttgaacaccaactttgctcaacatattgaccaagatacgttagttacatcactaccaaagcgattggctcggggttcagcaaaaattgcgattgatgactttaaacatatcaactcattctcgacattagaaacagcgatcgaatctctgccaatagaagctggtaggtggttatcactttacgcacagtcaaacaataatctaagtgatctattagcagccatgacagaggaccatcagctcatggcaagctgcgtcggttaccacttgttagaagagcccaaagataaaccaaactccctcagaggttacaaacacgctatcgccgagtgcatcattggactcattaactcaatcacctttagctcagagactgatcccaacacaatcttttggtcgctaaagaactatcaaaactacctagtggtacagccaaggagtatcaacgatgaaactaccgacaaatctagcctatgagcgctctatcgacccatcagatgtctgtttttttgtcgtctggcccgatgatagaaaaacacctttaacctacaattctcgtactctgctcgggcaaatggaagcggcatcattagcctatgatgtctcaggtcaaccaataaaaagtgccaccgctgaggcgttagctcaagggaaccctcatcaagttgatttctgccacgttccatacggtgcgagtcatattgaatgcagtttctccgtctcgttttcttctgaactacgtcaaccatataagtgtaactcaagcaaagttaaacaaacgctagtgcaattagtcgagctctacgaaacgaaaatcggctggactgagctagcaacccgatatttgatgaacatttgcaacggtaaatggctgtggaaaaatacccgtaaagcctattgctggaacattgtacttacaccttggccttggaacggggaaaaggttggatttgaagatattcgtactaactacacctcacggcaagactttaaaaataataaaaattggtctgctatagttgaaatgatcaaaaccgcattttctagtactgatgggctggcgatatttgaagtcagggccaccttgcacttgccaacgaatgctatggtgcggccaagccaagttttcacagaaaaagaaagtggcagtaaaagtaaatctaaaactcaaaacagtcgagtttttcagagtacaactattgatggtgaacgatcgccaatactaggggcctttaaaacgggagcagctattgcaaccattgacgactggtatcctgaagccactgagccactaagggtcggacggtttggggttcatcgcgaagatgtcacttgctaccgtcatccgtctaccggaaaagattttttctcgatattacaacaagcagagcactatattgaagtgttgagcgccaacaaaactcccgctcaagaaactatcaacgacatgcactttttaatggctaacctgattaagggtgggatgttccagcataaaggagactgactgtgaaatggtattataagacaatcacctttctgccagagttgtgcaacaacgagtcactggctgcaaagtgtctccgcgttctgcatggatttaactatcagtatgagacacgaaatatcggcgtttcatttccgctttggtgtgatgcaacggttggaaaaaagatttcatttgtcagcaagaacaagatagaactcgacttactacttaaacaacactatttcgtccaaatggaacaacttcaatactttcatatatccaacactgttctcgtcccagaagattgtacatacgtttcctttagacgctgtcaatctatagataagctcacagcagcagggctggcaaggaaaatcagacgcctggagaaacgtgctctatctagaggcgagcaatttgacccatcatcttttgctcaaaaagagcatactgcaatagcgcactaccactcacttggggagtccagcaaacagacgaaccgcaactttcgactcaatatcaggatgctctcggagcaaccccgtgaggggaactcgatttttagtagctatggcttatcaaattcagaaaactcgtttcagcctgtacccttaatctgacctttaataaggagatataccatggcgacaagtttacctacgccctcagcaattacgacttcggcgttagagtatgcattccatactcccgctcgcaatctaacgaaatctcgcggaaaaaacattcatcgttatgtcagtgtaaagatgagtaagaggattacggtagaatctactctagagtgtgatgcctgctatcactttgattttgagccaagtattgttcgcttttgcgctcaaccgattcgatttttatattatctcaatggtcagtctcactcctatgttcctgactttctagttcaatttgataccaacgagtttgttctatatgaagtaaagtcagcttatgctaagaacaaacctgattttgatgttgaatgggaggcgaaagtaaaagcagcaactgaactagggctagaattggagcttgttgaagagagtgatattagggatacggttgtattaaataatcttaagcgcatgcatcgttatgcttcgaaagatgagctgaataacgtacataactctctcttaaaaataataaagtacaatggcgcccaatctgcaagatgcttgggagaacagttgggtttaaaaggccgaactgttttaccaattttgtgcgatttgctgtcaaggtgtttactcgatacacgtttggataagcctctatctcttgaatctcgatttgagttggccagttatggctaagaaagggttctcaagtttccatagaaaagcagtctcttcccaagatacgcttgaatcgatagagcttgtctctagcgctaattgtctagaaagtgttacgtatcaagatatatcagcatttcccgaaacaattgcggtagagattaatttccgattaagcattcttcgctttttagcgcgaaagtgcgaaaccattgtggccaaatcaattgaaccacatcgtgtagagctacagcaaaactatagtagaaaaatacccagtgcaataacgatatatcgatggtggcttgcttttcgaaaatcagactacaaccccattagcttagcacctaatatcaaggatagaggtaatagagagacaaaagtgtcaacagttgttgattctattatggaacaggcagttgaaagagttatatctggacgaaaagtcaatgttagctctgcatataaacgtgttcgacgaaaagttcgtcaatacaatctaactcatggaacgaaatacacgtatcctaagtacgaatctgtaagaaagcgagtaaaaaagaaaaccccatttgagttattagccgcagggaaaggggagagagtagctaagagagagtttcgccgaatgggaaaaaagatcctcacgtctagcgtgctagagagggttgaaatagatcacactgtcgttgacctttttgcagtacacgaagagtatcgaatcccattgggccgaccttggcttactcaattggttgattgttacagtaaagctgtaatcggtttttatttaggtttcgagcctcctagctatgtgtcggtttcccttgcacttaagaatgcaatacaacgcaaagatgacttaatctcctcgtatgaatcgatcgagaatgaatggctatgttatggcatcccagacctactcgtaactgataatggtaaagagtttttgtcgaaagcatttgatcaagcatgtgaatcactattgatcaatgtgcatcaaaataaagttgagacgcccgacaacaaacctcatgttgaacgtaactacgggactattaatacttctctgttagacgatttacctgggaaatccttcagccagtaccttcaaagagaagggtacgactctgtgggagaagctacccttacactcaatgagattagagaaatttacttaatttggttggtggatatttatcataaaaaacccaatcagagaggcactaattgtcctaatgttgcgtggaaaaagggttgtcaagaatgggaaccagaggagttctctggttctaaagacgaattagactttaaatttgctattgttgattacaaacaacttactaaagtagggataactgtctacaaagaactgagttatagcaatgaccgtttagctgaatatagagggaagaaaggaaaccataaagttcagttcaagtataaccctgagtgtatggcagttatttgggtgttggatgaggatatgaatgagtactttacagttaatgcgattgactacgaatatgcaagtagagtatcactttggcaacataaatataacatgaaatatcaagcagaactaaattcagcagaatatgatgaggacaaggaaattgatgcagaaataaaaattgaagaaatcgcagatcgttcaattgttaagactaacaaaatcagagctcggaggcgtggcgctaggcatcaagagaatagcgcaagggctaagtcaatcagtaatgcgaacccggcctcgatacaaaaacatgaagatgaaatcgttagtgcagataatgacgattgggatattgattatgtctgagaaatcgtcaaatgagtgaaacgcgtgaggctcgtatatcaagagctaaaagggcatttgtatccacaccgagcgttaggaaaatcttgagttacatggatagatgtagagatctatcagacctagagtctgagcctacatgcatgatggtctatggtgcttcgggtgtaggtaaaacgaccgtcatcaagaaatacttaaatcaaaacagaagagagtccgaagccgggggcgatataataccggttttgcatattgagttgccagacaatgcgaagccagtagatgcagcaagggaattgctggttgaaatgggtgacccgctagcactttatgaaactgacttagctagattgacgaaaagactgactgaattaatccctgcggtcggcgtgaagctgattattatcgatgagttccaacatttggtggaagaaaggtcaaatcgggttcttacccaagtaggtaattggctaaaaatgatacttaacaaaacgaaatgtccaattgttatatttggtatgccatactcaaaagttgtactgcaagcaaactcgcaacttcacgggcgattttccattcaggttgaactgcgcccctttagctaccagggaggtagaggtgtatttaaaacttttttggaataccttgataaagccctaccttttgaaaaacaggctggcttagccaacgaaagtttgcagaaaaaattgtatgcattctctcagggaaacatgcgttcgttgagaaaccttatttatcaagcatctatcgaagcaattgataatcagcatgagacgataaccgaagaagatttcgtttttgcatcgaagttgacatcgggcgataaacccaactcatggaaaaatccttttgaggagggtgttgaggtaacagaagatatgttacgaccgccaccaaaagatattggttgggaggactatttgagacattcaaccccgagagtgagtaaaccaggtagaaataaaaactttttcgaataacctaggctgctgcgctgctgccaccgctgagcaataactagcataaccccttggggcctctaaacgggtcttgaggggttttttgctgaaacctcaggcatttgttgttgatacaaccataaaatgataattacacccataaattgataattatcacaccccgtacgggcagaatgcttaatgaattacaacagtactgcgatgagtggcagggcggggcgtaatttttttaaggcagttattggtgcccttctagagtccttactgcagtagttttgctgaaatactcgattcacaaaaatatcaacttatggttgttttgtgagatatcaatatatggttgttttgtggttaagttgctgattataaataattattaaatatcactttatggttgcatcaacaggtaccgagctcgaattcactggccgtcgttttacaacgtcgtgactgggaaaaccctggcgttacccaacttaatcgccttgctatcgtggccggatcttgcggcccctcggcttgaacgaattgttagacattatttgccgactaccttggtgatctcgcctttcacgtagtggacaaattcttccaactgatctgcgcgcgaggccaagcgatcttcttcttgtccaagataagcctgtctagcttcaagtatgacgggctgatactgggccggcaggcgctccattgcccagtcggcagcgacatccttcggcgcgattttgccggttactgcgctgtaccaaatgcgggacaacgtaagcactacatttcgctcatcgccagcccagtcgggcggcgagttccatagcgttaaggtttcatttagcgcctcaaatagatcctgttcaggaaccggatcaaagagttcctccgccgctggacctaccaaggcaacgctatgttctcttgcttttgtcagcaagatagccagatcaatgtcgatcgtggctggctcgaagatacctgcaagaatgtcattgcgctgccattctccaaattgcagttcgcgcttagctggataacgccacggaatgatgtcgtcgtgcacaacaatggtgacttctacagcgcggagaatctcgctctctccaggggaagccgaagtttccaaaaggtcgttgatcaaagctcgccgcgttgtttcatcaagccttacggtcaccgtaaccagcaaatcaatatcactgtgtggcttcaggccgccatccactgcggagccgtacaaatgtacggccagcaacgtcggttcgagatggcgctcgatgacgccaactacctctgatagttgagtcgatacttcggcgatcaccgcttccctcatactcttcctttttcaatattattgaagcatttatcagggttattgtctcatgagcggatacatatttgaatgtatttagaaaaataaacaaatagctagctcactcggtcgctacgctccgggcgtgagactgcggcgg

SEQ ID NO: 5171 - DNA, 2769 bp, synthetic construct
  source 1..2769: mol_type = other DNA
cacatttccccgaaaagtgccacctgacgtcccatggtgaagctcgcattacagtgaatgttgttgatgcaaccataaagtgatatttaataattatttataatcagcaacttaaccacaaaacaaccatatattgatatctcacaaaacaaccataagttgatatttttgtgaatcgagtatttcagcaaaactactgcagtaagaattggtcatcacttactgcgtgtcagagaggcggccgccgaagctaagtggtttcaccaaaactggtgaaactcacccagggattggctgagacgaaaaacatattctcaataaaccctttagggaaataggccaggttttcaccgtaacacgccacatcttgcgaatatatgtgtagaaactgccggaaatcgtcgtggtattcactccagagcgatgaaaacgtttcagtttgctcatggaaaacggtgtaacaagggtgaacactatcccatatcaccagctcaccgtctttcattgccatacggaactccggatgagcattcatcaggcgggcaagaatgtgaataaaggccggataaaacttgtgcttatttttctttacggtctttaaaaaggccgtaatatccagctgaacggtctggttataggtacattgagcaactgactggcatgtttcccttgtagtgggcgcgcccatgtgtagcagagaagaccctgctagcagtgtcggtgcgaatacgggtcgtagcaatgttggtctgactatgatcagagcgttatagttaaattgggtgtgataattatcaatttatgggtgtaattatcattttatggttgtatcaacaaatgtgagagttagctgcacatacgctcttccgcttcctcgctcactgactcgctgcgctcggtcgttcggctgcggcgagcggtatcagctcactcaaaggcggtaatacggttatccacagaatcaggggataacgcaggaaagaacatgtgagcaaaaggccagcaaaaggccaggaaccgtaaaaaggccgcgttgctggcgtttttccataggctccgcccccctgacgagcatcacaaaaatcgacgctcaagtcagaggtggcgaaacccgacaggactataaagataccaggcgtttccccctggaagctccctcgtgcgctctcctgttccgaccctgccgcttaccggatacctgtccgcctttctcccttcgggaagcgtggcgctttctcatagctcacgctgtaggtatctcagttcggtgtaggtcgttcgctccaagctgggctgtgtgcacgaaccccccgttcagcccgaccgctgcgccttatccggtaactatcgtcttgagtccaacccggtaagacacgacttatcgccactggcagcagccactggtaacaggattagcagagcgaggtatgtaggcggtgctacagagttcttgaagtggtggcctaactacggctacactagaagaacagtatttggtatctgcgctctgctgaagccagttaccttcggaaaaagagttggtagctcttgatccggcaaacaaaccaccgctggtagcggtggtttttttgtttgcaagcagcagattacgcgcagaaaaaaaggatctcaagaagatcctttgatcttttctacggggtctgacgctcagtggaacgaaaactcacgttaagggattttggtcatgagattatcaaaaaggatcttcacctagatccttttaaattaaaaatgaagttttaaatcaatctaaagtatatatgagtaaacttggtctgacagttaccaatgcttaatcagtgaggcacctatctcagcgatctgtctatttcgttcatccatagttgcctgactccccgtcgtgtagataactacgatacgggagggcttaccatctggccccagtgctgcaatgataccgcgagacccacgctcaccggctccagatttatcagcaataaaccagccagccggaagggccgagcgcagaagtggtcctgcaactttatccgcctccatccagtctattaattgttgccgggaagctagagtaagtagttcgccagttaatagtttgcgcaacgttgttgccattgctacaggcatcgtggtgtcacgctcgtcgtttggtatggcttcattcagctccggttcccaacgatcaaggcgagttacatgatcccccatgttgtgcaaaaaagcggttagctccttcggtcctccgatcgttgtcagaagtaagttggccgcagtgttatcactcatggttatggcagcactgcataattctcttactgtcatgccatccgtaagatgcttttctgtgactggtgagtactcaaccaagtcattctgagaatagtgtatgcggcgaccgagttgctcttgcccggcgtcaatacgggataataccgcgccacatagcagaactttaaaagtgctcatcattggaaaacgttcttcggggcgaaaactctcaaggatcttaccgctgttgagatccagttcgatgtaacccactcgtgcacccaactgatcttcagcatcttttactttcaccagcgtttctgggtgagcaaaaacaggaaggcaaaatgccgcaaaaaagggaataagggcgacacggaaatgttgaatactcatactcttcctttttcaatattattgaagcatttatcagggttattgtctcatgagcggatacatatttgaatgtatttagaaaaataaacaaataggggttccgcg

SEQ ID NO: 5172 - DNA, 2769 bp, synthetic construct
  source 1..2769: mol_type = other DNA
cgcggaacccctatttgtttatttttctaaatacattcaaatatgtatccgctcatgagacaataaccctgataaatgcttcaataatattgaaaaaggaagagtatgagtattcaacatttccgtgtcgcccttattcccttttttgcggcattttgccttcctgtttttgctcacccagaaacgctggtgaaagtaaaagatgctgaagatcagttgggtgcacgagtgggttacatcgaactggatctcaacagcggtaagatccttgagagttttcgccccgaagaacgttttccaatgatgagcacttttaaagttctgctatgtggcgcggtattatcccgtattgacgccgggcaagagcaactcggtcgccgcatacactattctcagaatgacttggttgagtactcaccagtcacagaaaagcatcttacggatggcatgacagtaagagaattatgcagtgctgccataaccatgagtgataacactgcggccaacttacttctgacaacgatcggaggaccgaaggagctaaccgcttttttgcacaacatgggggatcatgtaactcgccttgatcgttgggaaccggagctgaatgaagccataccaaacgacgagcgtgacaccacgatgcctgtagcaatggcaacaacgttgcgcaaactattaactggcgaactacttactctagcttcccggcaacaattaatagactggatggaggcggataaagttgcaggaccacttctgcgctcggcccttccggctggctggtttattgctgataaatctggagccggtgagcgtgggtctcgcggtatcattgcagcactggggccagatggtaagccctcccgtatcgtagttatctacacgacggggagtcaggcaactatggatgaacgaaatagacagatcgctgagataggtgcctcactgattaagcattggtaactgtcagaccaagtttactcatatatactttagattgatttaaaacttcatttttaatttaaaaggatctaggtgaagatcctttttgataatctcatgaccaaaatcccttaacgtgagttttcgttccactgagcgtcagaccccgtagaaaagatcaaaggatcttcttgagatcctttttttctgcgcgtaatctgctgcttgcaaacaaaaaaaccaccgctaccagcggtggtttgtttgccggatcaagagctaccaactctttttccgaaggtaactggcttcagcagagcgcagataccaaatactgttcttctagtgtagccgtagttaggccaccacttcaagaactctgtagcaccgcctacatacctcgctctgctaatcctgttaccagtggctgctgccagtggcgataagtcgtgtcttaccgggttggactcaagacgatagttaccggataaggcgcagcggtcgggctgaacggggggttcgtgcacacagcccagcttggagcgaacgacctacaccgaactgagatacctacagcgtgagctatgagaaagcgccacgcttcccgaagggagaaaggcggacaggtatccggtaagcggcagggtcggaacaggagagcgcacgagggagcttccagggggaaacgcctggtatctttatagtcctgtcgggtttcgccacctctgacttgagcgtcgatttttgtgatgctcgtcaggggggcggagcctatggaaaaacgccagcaacgcggcctttttacggttcctggccttttgctggccttttgctcacatgttctttcctgcgttatcccctgattctgtggataaccgtattaccgcctttgagtgagctgataccgctcgccgcagccgaacgaccgagcgcagcgagtcagtgagcgaggaagcggaagagcgtatgtgcagctaactctcacatttgtggatacaaccataaaatgataattacacccataaatggatcattatcacccccaatttaactataacgctctgatcatagtcagaccaacattgctacgacccgtattcgcaccgacactgctagcagggtcttctctgctacacatgggcgcgcccactacaagggaaacatgccagtcagttgctcaatgtacctataaccagaccgttcagctggatattacggcctttttaaagaccgtaaagaaaaataagcacaagttttatccggcctttattcacattcttgcccgcctgatgaatgctcatccggagttccgtatggcaatgaaagacggtgagctggtgatatgggatagtgttcacccttgttacaccgttttccatgagcaaactgaaacgttttcatcgctctggagtgaataccacgacgatttccggcagtttctacacatatattcgcaagatgtggcgtgttacggtgaaaacctggcctatttccctaaagggtttattgagaatatgtttttcgtctcagccaatccctgggtgagtttcaccagttttggtgaaaccacttagcttcggcggccgcctctctgacacgcagtaagtgatgaccaattcttactgcagtagttttgctgaaatactcgattcacaaaaatatcaacttatggttgttttgtgagatatcaatatatggttgttttgtggttaagttgctgattataaataattattaaatatcactttatggttgcatcaacaacattcactgtaatgcgagcttcaccatgggacgtcaggtggcacttttcggggaaatgtg

SEQ ID NO: 5173 - DNA, 2769 bp, synthetic construct
  source 1..2769: mol_type = other DNA
cgcggaacccctatttgtttatttttctaaatacattcaaatatgtatccgctcatgagacaataaccctgataaatgcttcaataatattgaaaaaggaagagtatgagtattcaacatttccgtgtcgcccttattcccttttttgcggcattttgccttcctgtttttgctcacccagaaacgctggtgaaagtaaaagatgctgaagatcagttgggtgcacgagtgggttacatcgaactggatctcaacagcggtaagatccttgagagttttcgccccgaagaacgttttccaatgatgagcacttttaaagttctgctatgtggcgcggtattatcccgtattgacgccgggcaagagcaactcggtcgccgcatacactattctcagaatgacttggttgagtactcaccagtcacagaaaagcatcttacggatggcatgacagtaagagaattatgcagtgctgccataaccatgagtgataacactgcggccaacttacttctgacaacgatcggaggaccgaaggagctaaccgcttttttgcacaacatgggggatcatgtaactcgccttgatcgttgggaaccggagctgaatgaagccataccaaacgacgagcgtgacaccacgatgcctgtagcaatggcaacaacgttgcgcaaactattaactggcgaactacttactctagcttcccggcaacaattaatagactggatggaggcggataaagttgcaggaccacttctgcgctcggcccttccggctggctggtttattgctgataaatctggagccggtgagcgtgggtctcgcggtatcattgcagcactggggccagatggtaagccctcccgtatcgtagttatctacacgacggggagtcaggcaactatggatgaacgaaatagacagatcgctgagataggtgcctcactgattaagcattggtaactgtcagaccaagtttactcatatatactttagattgatttaaaacttcatttttaatttaaaaggatctaggtgaagatcctttttgataatctcatgaccaaaatcccttaacgtgagttttcgttccactgagcgtcagaccccgtagaaaagatcaaaggatcttcttgagatcctttttttctgcgcgtaatctgctgcttgcaaacaaaaaaaccaccgctaccagcggtggtttgtttgccggatcaagagctaccaactctttttccgaaggtaactggcttcagcagagcgcagataccaaatactgttcttctagtgtagccgtagttaggccaccacttcaagaactctgtagcaccgcctacatacctcgctctgctaatcctgttaccagtggctgctgccagtggcgataagtcgtgtcttaccgggttggactcaagacgatagttaccggataaggcgcagcggtcgggctgaacggggggttcgtgcacacagcccagcttggagcgaacgacctacaccgaactgagatacctacagcgtgagctatgagaaagcgccacgcttcccgaagggagaaaggcggacaggtatccggtaagcggcagggtcggaacaggagagcgcacgagggagcttccagggggaaacgcctggtatctttatagtcctgtcgggtttcgccacctctgacttgagcgtcgatttttgtgatgctcgtcaggggggcggagcctatggaaaaacgccagcaacgcggcctttttacggttcctggccttttgctggccttttgctcacatgttctttcctgcgttatcccctgattctgtggataaccgtattaccgcctttgagtgagctgataccgctcgccgcagccgaacgaccgagcgcagcgagtcagtgagcgaggaagcggaagagcgtatgtgcagctaactctcacatttgtggatacaaccataaaacgataattacacccataaatggatcattatcacacccaatttaactataacgctctgatcatagtcagaccaacattgctacgacccgtattcgcaccgacactgctagcagggtcttctctgctacacatgggcgcgcccactacaagggaaacatgccagtcagttgctcaatgtacctataaccagaccgttcagctggatattacggcctttttaaagaccgtaaagaaaaataagcacaagttttatccggcctttattcacattcttgcccgcctgatgaatgctcatccggagttccgtatggcaatgaaagacggtgagctggtgatatgggatagtgttcacccttgttacaccgttttccatgagcaaactgaaacgttttcatcgctctggagtgaataccacgacgatttccggcagtttctacacatatattcgcaagatgtggcgtgttacggtgaaaacctggcctatttccctaaagggtttattgagaatatgtttttcgtctcagccaatccctgggtgagtttcaccagttttggtgaaaccacttagcttcggcggccgcctctctgacacgcagtaagtgatgaccaattcttactgcagtagttttgctgaaatactcgattcacaaaaatatcaacttatggttgttttgtgagatatcaatatatggttgttttgtggttaagttgctgattataaataattattaaatatcactttatggttgcatcaacaacattcactgtaatgcgagcttcaccatgggacgtcaggtggcacttttcggggaaatgtg

SEQ ID NO: 5174 - DNA, 2769 bp, synthetic construct
  source 1..2769: mol_type = other DNA
cgcggaacccctatttgtttatttttctaaatacattcaaatatgtatccgctcatgagacaataaccctgataaatgcttcaataatattgaaaaaggaagagtatgagtattcaacatttccgtgtcgcccttattcccttttttgcggcattttgccttcctgtttttgctcacccagaaacgctggtgaaagtaaaagatgctgaagatcagttgggtgcacgagtgggttacatcgaactggatctcaacagcggtaagatccttgagagttttcgccccgaagaacgttttccaatgatgagcacttttaaagttctgctatgtggcgcggtattatcccgtattgacgccgggcaagagcaactcggtcgccgcatacactattctcagaatgacttggttgagtactcaccagtcacagaaaagcatcttacggatggcatgacagtaagagaattatgcagtgctgccataaccatgagtgataacactgcggccaacttacttctgacaacgatcggaggaccgaaggagctaaccgcttttttgcacaacatgggggatcatgtaactcgccttgatcgttgggaaccggagctgaatgaagccataccaaacgacgagcgtgacaccacgatgcctgtagcaatggcaacaacgttgcgcaaactattaactggcgaactacttactctagcttcccggcaacaattaatagactggatggaggcggataaagttgcaggaccacttctgcgctcggcccttccggctggctggtttattgctgataaatctggagccggtgagcgtgggtctcgcggtatcattgcagcactggggccagatggtaagccctcccgtatcgtagttatctacacgacggggagtcaggcaactatggatgaacgaaatagacagatcgctgagataggtgcctcactgattaagcattggtaactgtcagaccaagtttactcatatatactttagattgatttaaaacttcatttttaatttaaaaggatctaggtgaagatcctttttgataatctcatgaccaaaatcccttaacgtgagttttcgttccactgagcgtcagaccccgtagaaaagatcaaaggatcttcttgagatcctttttttctgcgcgtaatctgctgcttgcaaacaaaaaaaccaccgctaccagcggtggtttgtttgccggatcaagagctaccaactctttttccgaaggtaactggcttcagcagagcgcagataccaaatactgttcttctagtgtagccgtagttaggccaccacttcaagaactctgtagcaccgcctacatacctcgctctgctaatcctgttaccagtggctgctgccagtggcgataagtcgtgtcttaccgggttggactcaagacgatagttaccggataaggcgcagcggtcgggctgaacggggggttcgtgcacacagcccagcttggagcgaacgacctacaccgaactgagatacctacagcgtgagctatgagaaagcgccacgcttcccgaagggagaaaggcggacaggtatccggtaagcggcagggtcggaacaggagagcgcacgagggagcttccagggggaaacgcctggtatctttatagtcctgtcgggtttcgccacctctgacttgagcgtcgatttttgtgatgctcgtcaggggggcggagcctatggaaaaacgccagcaacgcggcctttttacggttcctggccttttgctggccttttgctcacatgttctttcctgcgttatcccctgattctgtggataaccgtattaccgcctttgagtgagctgataccgctcgccgcagccgaacgaccgagcgcagcgagtcagtgagcgaggaagcggaagagcgtatgtgcagctaactctcacatttgtggatccaaccataaaatgataattacacccataaatggatcattatcacacccaatttaactataacgctctgatcatagtcagaccaacattgctacgacccgtattcgcaccgacactgctagcagggtcttctctgctacacatgggcgcgcccactacaagggaaacatgccagtcagttgctcaatgtacctataaccagaccgttcagctggatattacggcctttttaaagaccgtaaagaaaaataagcacaagttttatccggcctttattcacattcttgcccgcctgatgaatgctcatccggagttccgtatggcaatgaaagacggtgagctggtgatatgggatagtgttcacccttgttacaccgttttccatgagcaaactgaaacgttttcatcgctctggagtgaataccacgacgatttccggcagtttctacacatatattcgcaagatgtggcgtgttacggtgaaaacctggcctatttccctaaagggtttattgagaatatgtttttcgtctcagccaatccctgggtgagtttcaccagttttggtgaaaccacttagcttcggcggccgcctctctgacacgcagtaagtgatgaccaattcttactgcagtagttttgctgaaatactcgattcacaaaaatatcaacttatggttgttttgtgagatatcaatatatggttgttttgtggttaagttgctgattataaataattattaaatatcactttatggttgcatcaacaacattcactgtaatgcgagcttcaccatgggacgtcaggtggcacttttcggggaaatgtg

SEQ ID NO: 5175 - DNA, 2769 bp, synthetic construct
  source 1..2769: mol_type = other DNA
cgcggaacccctatttgtttatttttctaaatacattcaaatatgtatccgctcatgagacaataaccctgataaatgcttcaataatattgaaaaaggaagagtatgagtattcaacatttccgtgtcgcccttattcccttttttgcggcattttgccttcctgtttttgctcacccagaaacgctggtgaaagtaaaagatgctgaagatcagttgggtgcacgagtgggttacatcgaactggatctcaacagcggtaagatccttgagagttttcgccccgaagaacgttttccaatgatgagcacttttaaagttctgctatgtggcgcggtattatcccgtattgacgccgggcaagagcaactcggtcgccgcatacactattctcagaatgacttggttgagtactcaccagtcacagaaaagcatcttacggatggcatgacagtaagagaattatgcagtgctgccataaccatgagtgataacactgcggccaacttacttctgacaacgatcggaggaccgaaggagctaaccgcttttttgcacaacatgggggatcatgtaactcgccttgatcgttgggaaccggagctgaatgaagccataccaaacgacgagcgtgacaccacgatgcctgtagcaatggcaacaacgttgcgcaaactattaactggcgaactacttactctagcttcccggcaacaattaatagactggatggaggcggataaagttgcaggaccacttctgcgctcggcccttccggctggctggtttattgctgataaatctggagccggtgagcgtgggtctcgcggtatcattgcagcactggggccagatggtaagccctcccgtatcgtagttatctacacgacggggagtcaggcaactatggatgaacgaaatagacagatcgctgagataggtgcctcactgattaagcattggtaactgtcagaccaagtttactcatatatactttagattgatttaaaacttcatttttaatttaaaaggatctaggtgaagatcctttttgataatctcatgaccaaaatcccttaacgtgagttttcgttccactgagcgtcagaccccgtagaaaagatcaaaggatcttcttgagatcctttttttctgcgcgtaatctgctgcttgcaaacaaaaaaaccaccgctaccagcggtggtttgtttgccggatcaagagctaccaactctttttccgaaggtaactggcttcagcagagcgcagataccaaatactgttcttctagtgtagccgtagttaggccaccacttcaagaactctgtagcaccgcctacatacctcgctctgctaatcctgttaccagtggctgctgccagtggcgataagtcgtgtcttaccgggttggactcaagacgatagttaccggataaggcgcagcggtcgggctgaacggggggttcgtgcacacagcccagcttggagcgaacgacctacaccgaactgagatacctacagcgtgagctatgagaaagcgccacgcttcccgaagggagaaaggcggacaggtatccggtaagcggcagggtcggaacaggagagcgcacgagggagcttccagggggaaacgcctggtatctttatagtcctgtcgggtttcgccacctctgacttgagcgtcgatttttgtgatgctcgtcaggggggcggagcctatggaaaaacgccagcaacgcggcctttttacggttcctggccttttgctggccttttgctcacatgttctttcctgcgttatcccctgattctgtggataaccgtattaccgcctttgagtgagctgataccgctcgccgcagccgaacgaccgagcgcagcgagtcagtgagcgaggaagcggaagagcgtatgtgcagctaactctcacatttgttgatacaaccataaaaggattattacacccattaattgataattatcacacccaatttaactataacgctctgatcatagtcagaccaacattgctacgacccgtattcgcaccgacactgctagcagggtcttctctgctacacatgggcgcgcccactacaagggaaacatgccagtcagttgctcaatgtacctataaccagaccgttcagctggatattacggcctttttaaagaccgtaaagaaaaataagcacaagttttatccggcctttattcacattcttgcccgcctgatgaatgctcatccggagttccgtatggcaatgaaagacggtgagctggtgatatgggatagtgttcacccttgttacaccgttttccatgagcaaactgaaacgttttcatcgctctggagtgaataccacgacgatttccggcagtttctacacatatattcgcaagatgtggcgtgttacggtgaaaacctggcctatttccctaaagggtttattgagaatatgtttttcgtctcagccaatccctgggtgagtttcaccagttttggtgaaaccacttagcttcggcggccgcctctctgacacgcagtaagtgatgaccaattcttactgcagtagttttgctgaaatactcgattcacaaaaatatcaacttatggttgttttgtgagatatcaatatatggttgttttgtggttaagttgctgattataaataattattaaatatcactttatggttgcatcaacaacattcactgtaatgcgagcttcaccatgggacgtcaggtggcacttttcggggaaatgtg

SEQ ID NO: 5176 - DNA, 2769 bp, synthetic construct
  source 1..2769: mol_type = other DNA
cgcggaacccctatttgtttatttttctaaatacattcaaatatgtatccgctcatgagacaataaccctgataaatgcttcaataatattgaaaaaggaagagtatgagtattcaacatttccgtgtcgcccttattcccttttttgcggcattttgccttcctgtttttgctcacccagaaacgctggtgaaagtaaaagatgctgaagatcagttgggtgcacgagtgggttacatcgaactggatctcaacagcggtaagatccttgagagttttcgccccgaagaacgttttccaatgatgagcacttttaaagttctgctatgtggcgcggtattatcccgtattgacgccgggcaagagcaactcggtcgccgcatacactattctcagaatgacttggttgagtactcaccagtcacagaaaagcatcttacggatggcatgacagtaagagaattatgcagtgctgccataaccatgagtgataacactgcggccaacttacttctgacaacgatcggaggaccgaaggagctaaccgcttttttgcacaacatgggggatcatgtaactcgccttgatcgttgggaaccggagctgaatgaagccataccaaacgacgagcgtgacaccacgatgcctgtagcaatggcaacaacgttgcgcaaactattaactggcgaactacttactctagcttcccggcaacaattaatagactggatggaggcggataaagttgcaggaccacttctgcgctcggcccttccggctggctggtttattgctgataaatctggagccggtgagcgtgggtctcgcggtatcattgcagcactggggccagatggtaagccctcccgtatcgtagttatctacacgacggggagtcaggcaactatggatgaacgaaatagacagatcgctgagataggtgcctcactgattaagcattggtaactgtcagaccaagtttactcatatatactttagattgatttaaaacttcatttttaatttaaaaggatctaggtgaagatcctttttgataatctcatgaccaaaatcccttaacgtgagttttcgttccactgagcgtcagaccccgtagaaaagatcaaaggatcttcttgagatcctttttttctgcgcgtaatctgctgcttgcaaacaaaaaaaccaccgctaccagcggtggtttgtttgccggatcaagagctaccaactctttttccgaaggtaactggcttcagcagagcgcagataccaaatactgttcttctagtgtagccgtagttaggccaccacttcaagaactctgtagcaccgcctacatacctcgctctgctaatcctgttaccagtggctgctgccagtggcgataagtcgtgtcttaccgggttggactcaagacgatagttaccggataaggcgcagcggtcgggctgaacggggggttcgtgcacacagcccagcttggagcgaacgacctacaccgaactgagatacctacagcgtgagctatgagaaagcgccacgcttcccgaagggagaaaggcggacaggtatccggtaagcggcagggtcggaacaggagagcgcacgagggagcttccagggggaaacgcctggtatctttatagtcctgtcgggtttcgccacctctgacttgagcgtcgatttttgtgatgctcgtcaggggggcggagcctatggaaaaacgccagcaacgcggcctttttacggttcctggccttttgctggccttttgctcacatgttctttcctgcgttatcccctgattctgtggataaccgtattaccgcctttgagtgagctgataccgctcgccgcagccgaacgaccgagcgcagcgagtcagtgagcgaggaagcggaagagcgtatgtgcagctaactctcacatttgttgatacaaccatcaaatggtaattacacccataaattgataattatcacacccaatttaactataacgctctgatcatagtcagaccaacattgctacgacccgtattcgcaccgacactgctagcagggtcttctctgctacacatgggcgcgcccactacaagggaaacatgccagtcagttgctcaatgtacctataaccagaccgttcagctggatattacggcctttttaaagaccgtaaagaaaaataagcacaagttttatccggcctttattcacattcttgcccgcctgatgaatgctcatccggagttccgtatggcaatgaaagacggtgagctggtgatatgggatagtgttcacccttgttacaccgttttccatgagcaaactgaaacgttttcatcgctctggagtgaataccacgacgatttccggcagtttctacacatatattcgcaagatgtggcgtgttacggtgaaaacctggcctatttccctaaagggtttattgagaatatgtttttcgtctcagccaatccctgggtgagtttcaccagttttggtgaaaccacttagcttcggcggccgcctctctgacacgcagtaagtgatgaccaattcttactgcagtagttttgctgaaatactcgattcacaaaaatatcaacttatggttgttttgtgagatatcaatatatggttgttttgtggttaagttgctgattataaataattattaaatatcactttatggttgcatcaacaacattcactgtaatgcgagcttcaccatgggacgtcaggtggcacttttcggggaaatgtg

SEQ ID NO: 5177 - DNA, 2769 bp, synthetic construct
  source 1..2769: mol_type = other DNA
cgcggaacccctatttgtttatttttctaaatacattcaaatatgtatccgctcatgagacaataaccctgataaatgcttcaataatattgaaaaaggaagagtatgagtattcaacatttccgtgtcgcccttattcccttttttgcggcattttgccttcctgtttttgctcacccagaaacgctggtgaaagtaaaagatgctgaagatcagttgggtgcacgagtgggttacatcgaactggatctcaacagcggtaagatccttgagagttttcgccccgaagaacgttttccaatgatgagcacttttaaagttctgctatgtggcgcggtattatcccgtattgacgccgggcaagagcaactcggtcgccgcatacactattctcagaatgacttggttgagtactcaccagtcacagaaaagcatcttacggatggcatgacagtaagagaattatgcagtgctgccataaccatgagtgataacactgcggccaacttacttctgacaacgatcggaggaccgaaggagctaaccgcttttttgcacaacatgggggatcatgtaactcgccttgatcgttgggaaccggagctgaatgaagccataccaaacgacgagcgtgacaccacgatgcctgtagcaatggcaacaacgttgcgcaaactattaactggcgaactacttactctagcttcccggcaacaattaatagactggatggaggcggataaagttgcaggaccacttctgcgctcggcccttccggctggctggtttattgctgataaatctggagccggtgagcgtgggtctcgcggtatcattgcagcactggggccagatggtaagccctcccgtatcgtagttatctacacgacggggagtcaggcaactatggatgaacgaaatagacagatcgctgagataggtgcctcactgattaagcattggtaactgtcagaccaagtttactcatatatactttagattgatttaaaacttcatttttaatttaaaaggatctaggtgaagatcctttttgataatctcatgaccaaaatcccttaacgtgagttttcgttccactgagcgtcagaccccgtagaaaagatcaaaggatcttcttgagatcctttttttctgcgcgtaatctgctgcttgcaaacaaaaaaaccaccgctaccagcggtggtttgtttgccggatcaagagctaccaactctttttccgaaggtaactggcttcagcagagcgcagataccaaatactgttcttctagtgtagccgtagttaggccaccacttcaagaactctgtagcaccgcctacatacctcgctctgctaatcctgttaccagtggctgctgccagtggcgataagtcgtgtcttaccgggttggactcaagacgatagttaccggataaggcgcagcggtcgggctgaacggggggttcgtgcacacagcccagcttggagcgaacgacctacaccgaactgagatacctacagcgtgagctatgagaaagcgccacgcttcccgaagggagaaaggcggacaggtatccggtaagcggcagggtcggaacaggagagcgcacgagggagcttccagggggaaacgcctggtatctttatagtcctgtcgggtttcgccacctctgacttgagcgtcgatttttgtgatgctcgtcaggggggcggagcctatggaaaaacgccagcaacgcggcctttttacggttcctggccttttgctggccttttgctcacatgttctttcctgcgttatcccctgattctgtggataaccgtattaccgcctttgagtgagctgataccgctcgccgcagccgaacgaccgagcgcagcgagtcagtgagcgaggaagcggaagagcgtatgtgcagctaactctcacatttgttgatacaaccattaaatgataattccacccataatttgataattatcacacccaatttaactataacgctctgatcatagtcagaccaacattgctacgacccgtattcgcaccgacactgctagcagggtcttctctgctacacatgggcgcgcccactacaagggaaacatgccagtcagttgctcaatgtacctataaccagaccgttcagctggatattacggcctttttaaagaccgtaaagaaaaataagcacaagttttatccggcctttattcacattcttgcccgcctgatgaatgctcatccggagttccgtatggcaatgaaagacggtgagctggtgatatgggatagtgttcacccttgttacaccgttttccatgagcaaactgaaacgttttcatcgctctggagtgaataccacgacgatttccggcagtttctacacatatattcgcaagatgtggcgtgttacggtgaaaacctggcctatttccctaaagggtttattgagaatatgtttttcgtctcagccaatccctgggtgagtttcaccagttttggtgaaaccacttagcttcggcggccgcctctctgacacgcagtaagtgatgaccaattcttactgcagtagttttgctgaaatactcgattcacaaaaatatcaacttatggttgttttgtgagatatcaatatatggttgttttgtggttaagttgctgattataaataattattaaatatcactttatggttgcatcaacaacattcactgtaatgcgagcttcaccatgggacgtcaggtggcacttttcggggaaatgtg

SEQ ID NO: 5178 - DNA, 2769 bp, synthetic construct
  source 1..2769: mol_type = other DNA
cgcggaacccctatttgtttatttttctaaatacattcaaatatgtatccgctcatgagacaataaccctgataaatgcttcaataatattgaaaaaggaagagtatgagtattcaacatttccgtgtcgcccttattcccttttttgcggcattttgccttcctgtttttgctcacccagaaacgctggtgaaagtaaaagatgctgaagatcagttgggtgcacgagtgggttacatcgaactggatctcaacagcggtaagatccttgagagttttcgccccgaagaacgttttccaatgatgagcacttttaaagttctgctatgtggcgcggtattatcccgtattgacgccgggcaagagcaactcggtcgccgcatacactattctcagaatgacttggttgagtactcaccagtcacagaaaagcatcttacggatggcatgacagtaagagaattatgcagtgctgccataaccatgagtgataacactgcggccaacttacttctgacaacgatcggaggaccgaaggagctaaccgcttttttgcacaacatgggggatcatgtaactcgccttgatcgttgggaaccggagctgaatgaagccataccaaacgacgagcgtgacaccacgatgcctgtagcaatggcaacaacgttgcgcaaactattaactggcgaactacttactctagcttcccggcaacaattaatagactggatggaggcggataaagttgcaggaccacttctgcgctcggcccttccggctggctggtttattgctgataaatctggagccggtgagcgtgggtctcgcggtatcattgcagcactggggccagatggtaagccctcccgtatcgtagttatctacacgacggggagtcaggcaactatggatgaacgaaatagacagatcgctgagataggtgcctcactgattaagcattggtaactgtcagaccaagtttactcatatatactttagattgatttaaaacttcatttttaatttaaaaggatctaggtgaagatcctttttgataatctcatgaccaaaatcccttaacgtgagttttcgttccactgagcgtcagaccccgtagaaaagatcaaaggatcttcttgagatcctttttttctgcgcgtaatctgctgcttgcaaacaaaaaaaccaccgctaccagcggtggtttgtttgccggatcaagagctaccaactctttttccgaaggtaactggcttcagcagagcgcagataccaaatactgttcttctagtgtagccgtagttaggccaccacttcaagaactctgtagcaccgcctacatacctcgctctgctaatcctgttaccagtggctgctgccagtggcgataagtcgtgtcttaccgggttggactcaagacgatagttaccggataaggcgcagcggtcgggctgaacggggggttcgtgcacacagcccagcttggagcgaacgacctacaccgaactgagatacctacagcgtgagctatgagaaagcgccacgcttcccgaagggagaaaggcggacaggtatccggtaagcggcagggtcggaacaggagagcgcacgagggagcttccagggggaaacgcctggtatctttatagtcctgtcgggtttcgccacctctgacttgagcgtcgatttttgtgatgctcgtcaggggggcggagcctatggaaaaacgccagcaacgcggcctttttacggttcctggccttttgctggccttttgctcacatgttctttcctgcgttatcccctgattctgtggataaccgtattaccgcctttgagtgagctgataccgctcgccgcagccgaacgaccgagcgcagcgagtcagtgagcgaggaagcggaagagcgtatgtgcagctaactctcacatttgttgatacaaccattaaatggtaattccacccaaatattgataattatcacacccaatttaactataacgctctgatcatagtcagaccaacattgctacgacccgtattcgcaccgacactgctagcagggtcttctctgctacacatgggcgcgcccactacaagggaaacatgccagtcagttgctcaatgtacctataaccagaccgttcagctggatattacggcctttttaaagaccgtaaagaaaaataagcacaagttttatccggcctttattcacattcttgcccgcctgatgaatgctcatccggagttccgtatggcaatgaaagacggtgagctggtgatatgggatagtgttcacccttgttacaccgttttccatgagcaaactgaaacgttttcatcgctctggagtgaataccacgacgatttccggcagtttctacacatatattcgcaagatgtggcgtgttacggtgaaaacctggcctatttccctaaagggtttattgagaatatgtttttcgtctcagccaatccctgggtgagtttcaccagttttggtgaaaccacttagcttcggcggccgcctctctgacacgcagtaagtgatgaccaattcttactgcagtagttttgctgaaatactcgattcacaaaaatatcaacttatggttgttttgtgagatatcaatatatggttgttttgtggttaagttgctgattataaataattattaaatatcactttatggttgcatcaacaacattcactgtaatgcgagcttcaccatgggacgtcaggtggcacttttcggggaaatgtg

SEQ ID NO: 5179 - DNA, 2769 bp, synthetic construct
  source 1..2769: mol_type = other DNA
cgcggaacccctatttgtttatttttctaaatacattcaaatatgtatccgctcatgagacaataaccctgataaatgcttcaataatattgaaaaaggaagagtatgagtattcaacatttccgtgtcgcccttattcccttttttgcggcattttgccttcctgtttttgctcacccagaaacgctggtgaaagtaaaagatgctgaagatcagttgggtgcacgagtgggttacatcgaactggatctcaacagcggtaagatccttgagagttttcgccccgaagaacgttttccaatgatgagcacttttaaagttctgctatgtggcgcggtattatcccgtattgacgccgggcaagagcaactcggtcgccgcatacactattctcagaatgacttggttgagtactcaccagtcacagaaaagcatcttacggatggcatgacagtaagagaattatgcagtgctgccataaccatgagtgataacactgcggccaacttacttctgacaacgatcggaggaccgaaggagctaaccgcttttttgcacaacatgggggatcatgtaactcgccttgatcgttgggaaccggagctgaatgaagccataccaaacgacgagcgtgacaccacgatgcctgtagcaatggcaacaacgttgcgcaaactattaactggcgaactacttactctagcttcccggcaacaattaatagactggatggaggcggataaagttgcaggaccacttctgcgctcggcccttccggctggctggtttattgctgataaatctggagccggtgagcgtgggtctcgcggtatcattgcagcactggggccagatggtaagccctcccgtatcgtagttatctacacgacggggagtcaggcaactatggatgaacgaaatagacagatcgctgagataggtgcctcactgattaagcattggtaactgtcagaccaagtttactcatatatactttagattgatttaaaacttcatttttaatttaaaaggatctaggtgaagatcctttttgataatctcatgaccaaaatcccttaacgtgagttttcgttccactgagcgtcagaccccgtagaaaagatcaaaggatcttcttgagatcctttttttctgcgcgtaatctgctgcttgcaaacaaaaaaaccaccgctaccagcggtggtttgtttgccggatcaagagctaccaactctttttccgaaggtaactggcttcagcagagcgcagataccaaatactgttcttctagtgtagccgtagttaggccaccacttcaagaactctgtagcaccgcctacatacctcgctctgctaatcctgttaccagtggctgctgccagtggcgataagtcgtgtcttaccgggttggactcaagacgatagttaccggataaggcgcagcggtcgggctgaacggggggttcgtgcacacagcccagcttggagcgaacgacctacaccgaactgagatacctacagcgtgagctatgagaaagcgccacgcttcccgaagggagaaaggcggacaggtatccggtaagcggcagggtcggaacaggagagcgcacgagggagcttccagggggaaacgcctggtatctttatagtcctgtcgggtttcgccacctctgacttgagcgtcgatttttgtgatgctcgtcaggggggcggagcctatggaaaaacgccagcaacgcggcctttttacggttcctggccttttgctggccttttgctcacatgttctttcctgcgttatcccctgattctgtggataaccgtattaccgcctttgagtgagctgataccgctcgccgcagccgaacgaccgagcgcagcgagtcagtgagcgaggaagcggaagagcgtatgtgcagctaactctcacatttgttgataccaccatcaaatggtaattccacccctacattgataattatcacacccaatttaactataacgctctgatcatagtcagaccaacattgctacgacccgtattcgcaccgacactgctagcagggtcttctctgctacacatgggcgcgcccactacaagggaaacatgccagtcagttgctcaatgtacctataaccagaccgttcagctggatattacggcctttttaaagaccgtaaagaaaaataagcacaagttttatccggcctttattcacattcttgcccgcctgatgaatgctcatccggagttccgtatggcaatgaaagacggtgagctggtgatatgggatagtgttcacccttgttacaccgttttccatgagcaaactgaaacgttttcatcgctctggagtgaataccacgacgatttccggcagtttctacacatatattcgcaagatgtggcgtgttacggtgaaaacctggcctatttccctaaagggtttattgagaatatgtttttcgtctcagccaatccctgggtgagtttcaccagttttggtgaaaccacttagcttcggcggccgcctctctgacacgcagtaagtgatgaccaattcttactgcagtagttttgctgaaatactcgattcacaaaaatatcaacttatggttgttttgtgagatatcaatatatggttgttttgtggttaagttgctgattataaataattattaaatatcactttatggttgcatcaacaacattcactgtaatgcgagcttcaccatgggacgtcaggtggcacttttcggggaaatgtg

SEQ ID NO: 5180 - DNA, 2686 bp, synthetic construct
  source 1..2686: mol_type = other DNA
actagaagaacagtatttggtatctgcgctctgctgaagccagttaccttcggaaaaagagttggtagctcttgatccggcaaacaaaccaccgctggtagcggtggtttttttgtttgcaagcagcagattacgcgcagaaaaaaaggatctcaagaagatcctttgatcttttctacggggtctgacgctcagtggaacgaaaactcacgttaagggattttggtcatgagattatcaaaaaggatcttcacctagatccttttaaattaaaaatgaagttttaaatcaatctaaagtatatatgagtaaacttggtctgacagttaccaatgcttaatcagtgaggcacctatctcagcgatctgtctatttcgttcatccatagttgcctgactccccgtcgtgtagataactacgatacgggagggcttaccatctggccccagtgctgcaatgataccgcgagacccacgctcaccggctccagatttatcagcaataaaccagccagccggaagggccgagcgcagaagtggtcctgcaactttatccgcctccatccagtctattaattgttgccgggaagctagagtaagtagttcgccagttaatagtttgcgcaacgttgttgccattgctacaggcatcgtggtgtcacgctcgtcgtttggtatggcttcattcagctccggttcccaacgatcaaggcgagttacatgatcccccatgttgtgcaaaaaagcggttagctccttcggtcctccgatcgttgtcagaagtaagttggccgcagtgttatcactcatggttatggcagcactgcataattctcttactgtcatgccatccgtaagatgcttttctgtgactggtgagtactcaaccaagtcattctgagaatagtgtatgcggcgaccgagttgctcttgcccggcgtcaatacgggataataccgcgccacatagcagaactttaaaagtgctcatcattggaaaacgttcttcggggcgaaaactctcaaggatcttaccgctgttgagatccagttcgatgtaacccactcgtgcacccaactgatcttcagcatcttttactttcaccagcgtttctgggtgagcaaaaacaggaaggcaaaatgccgcaaaaaagggaataagggcgacacggaaatgttgaatactcatactcttcctttttcaatattattgaagcatttatcagggttattgtctcatgagcggatacatatttgaatgtatttagaaaaataaacaaataggggttccgcgcacatttccccgaaaagtgccacctgacgtctaagaaaccattattatcatgacattaacctataaaaataggcgtatcacgaggccctttcgtctcgcgcgtttcggtgatgacggtgaaaacctctgacacatgcagctcccggagacggtcacagcttgtctgtaagcggatgccgggagcagacaagcccgtcagggcgcgtcagcgggtgttggcgggtgtcggggctggcttaactatgcggcatcagagcagattgtactgagagtgcaccatatgcggtgtgaaataccgcacagatgcgtaaggagaaaataccgcatcaggcgccattcgccattcaggctgcgcaactgttgggaagggcgatcggtgcgggcctcttcgctattacgccagctggcgaaagggggatgtgctgcaaggcgattaagttgggtaacgccagggttttcccagtcacgacgttgtaaaacgacggccagtgaattcgagctcggtacccggggatcctctagagtcgacctgcaggcatgcaagcttggcgtaatcatggtcatagctgtttcctgtgtgaaattgttatccgctcacaattccacacaacatacgagccggaagcataaagtgtaaagcctggggtgcctaatgagtgagctaactcacattaattgcgttgcgctcactgcccgctttccagtcgggaaacctgtcgtgccagctgcattaatgaatcggccaacgcgcggggagaggcggtttgcgtattgggcgctcttccgcttcctcgctcactgactcgctgcgctcggtcgttcggctgcggcgagcggtatcagctcactcaaaggcggtaatacggttatccacagaatcaggggataacgcaggaaagaacatgtgagcaaaaggccagcaaaaggccaggaaccgtaaaaaggccgcgttgctggcgtttttccataggctccgcccccctgacgagcatcacaaaaatcgacgctcaagtcagaggtggcgaaacccgacaggactataaagataccaggcgtttccccctggaagctccctcgtgcgctctcctgttccgaccctgccgcttaccggatacctgtccgcctttctcccttcgggaagcgtggcgctttctcatagctcacgctgtaggtatctcagttcggtgtaggtcgttcgctccaagctgggctgtgtgcacgaaccccccgttcagcccgaccgctgcgccttatccggtaactatcgtcttgagtccaacccggtaagacacgacttatcgccactggcagcagccactggtaacaggattagcagagcgaggtatgtaggcggtgctacagagttcttgaagtggtggcctaactacggctac

SEQ ID NO: 5181 - DNA, 4130 bp, synthetic construct
  source 1..4130: mol_type = other DNA
cgggatctcgacgctctcccttatgcgactcctgcattaggaaattaatacgactcactataggggaattgtgagcggataacaattcccctgtagaaataattttgtttaactttaataaggagatataccatgagcaaaggagaagaacttttcactggagttgtcccaattcttgttgaattagatggtgatgttaatgggcacaaattttctgtccgtggagagggtgaaggtgatgctacaaacggaaaactcacccttaaatttatttgcactactggaaaactacctgttccgtggccaacacttgtcactactctgacctatggtgttcaatgcttttcccgttatccggatcacatgaaacggcatgactttttcaagagtgccatgcccgaaggttatgtacaggaacgcactatatctttcaaagatgacgggacctacaagacgcgtgctgaagtcaagtttgaaggtgatacccttgttaatcgtatcgagttaaagggtattgattttaaagaagatggaaacattcttggacacaaactcgagtacaactttaactcacacaatgtatacatcacggcagacaaacaaaagaatggaatcaaagctaacttcaaaattcgccacaacgttgaagatggttccgttcaactagcagaccattatcaacaaaatactccaattggcgatggccccgtccttttaccagacaaccattacctgtcgacacaatctgtcctttcgaaagatcccaacgaaaaggatgttggtggaggtggatcagaaggaggcggtagcggaggacctggttcgggaggagaaggttctgctggtggaggtagtgctggaggtggatctcgtgaccacatggtccttcttgagtttgtaactgctgctgggattacacatggctgagcaataactagcataaccccttggggcctctaaacgggtcttgaggggttttttgctgaaacctcaggcatttgagaagcacacggtcacactgcttccggtagtcaataaaccggtaaaccagcaatagacataagcggctatttaacgaccctgccctgaaccgacgacaagctgacgaccgggtctccgcaagtggcacttttcggggaaatgtgcgcggaacccctatttgtttatttttctaaatacattcaaatatgtatccgctcatgaattaattcttagaaaaactcatcgagcatcaaatgaaactgcaatttattcatatcaggattatcaataccatatttttgaaaaagccgtttctgtaatgaaggagaaaactcaccgaggcagttccataggatggcaagatcctggtatcggtctgcgattccgactcgtccaacatcaatacaacctattaatttcccctcgtcaaaaataaggttatcaagtgagaaatcaccatgagtgacgactgaatccggtgagaatggcaaaagtttatgcatttctttccagacttgttcaacaggccagccattacgctcgtcatcaaaatcactcgcatcaaccaaaccgttattcattcgtgattgcgcctgagcgagacgaaatacgcggtcgctgttaaaaggacaattacaaacaggaatcgaatgcaaccggcgcaggaacactgccagcgcatcaacaatattttcacctgaatcaggatattcttctaatacctggaatgctgttttcccggggatcgcagtggtgagtaaccatgcatcatcaggagtacggataaaatgcttgatggtcggaagaggcataaattccgtcagccagtttagtctgaccatctcatctgtaacatcattggcaacgctacctttgccatgtttcagaaacaactctggcgcatcgggcttcccatacaatcgatagattgtcgcacctgattgcccgacattatcgcgagcccatttatacccatataaatcagcatccatgttggaatttaatcgcggcctagagcaagacgtttcccgttgaatatggctcatactcttcctttttcaatattattgaagcatttatcagggttattgtctcatgagcggatacatatttgaatgtatttagaaaaataaacaaataggcatgctagcgcagaaacgtcctagaagatgccaggaggatacttagcagagagacaataaggccggagcgaagccgtttttccataggctccgcccccctgacgaacatcacgaaatctgacgctcaaatcagtggtggcgaaacccgacaggactataaagataccaggcgtttccccctgatggctccctcttgcgctctcctgttcccgtcctgcggcgtccgtgttgtggtggaggctttacccaaatcaccacgtcccgttccgtgtagacagttcgctccaagctgggctgtgtgcaagaaccccccgttcagcccgactgctgcgccttatccggtaactatcatcttgagtccaacccggaaagacacgacaaaacgccactggcagcagccattggtaactgagaattagtggatttagatatcgagagtcttgaagtggtggcctaacagaggctacactgaaaggacagtatttggtatctgcgctccactaaagccagttaccaggttaagcagttccccaactgacttaaccttcgatcaaaccgcctccccaggcggttttttcgtttacagagcaggagattacgacgatcgtaaaaggatctcaagaagatcctttacggattcccgacaccatcactctagatttcagtgcaatttatctcttcaaatgtagcacctgaagtcagccccatacgatataagttgtaattctcatgttagtcatgccccgcgcccaccggaaggagctgactgggttgaaggctctcaagggcatcggtcgagatcccggtgcctaatgagtgagctaacttacattaattgcgttgcgctcactgcccgctttccagtcgggaaacctgtcgtgccagctgcattaatgaatcggccaacgcgcggggagaggcggtttgcgtattgggcgccagggtggtttttcttttcaccagtgagacgggcaacagctgattgcccttcaccgcctggccctgagagagttgcagcaagcggtccacgctggtttgccccagcaggcgaaaatcctgtttgatggtggttaacggcgggatataacatgagctgtcttcggtatcgtcgtatcccactaccgagatgtccgcaccaacgcgcagcccggactcggtaatggcgcgcattgcgcccagcgccatctgatcgttggcaaccagcatcgcagtgggaacgatgccctcattcagcatttgcatggtttgttgaaaaccggacatggcactccagtcgccttcccgttccgctatcggctgaatttgattgcgagtgagatatttatgccagccagccagacgcagacgcgccgagacagaacttaatgggcccgctaacagcgcgatttgctggtgacccaatgcgaccagatgctccacgcccagtcgcgtaccgtcttcatgggagaaaataatactgttgatgggtgtctggtcagagacatcaagaaataacgccggaacattagtgcaggcagcttccacagcaatggcatcctggtcatccagcggatagttaatgatcagcccactgacgcgttgcgcgagaagattgtgcaccgccgctttacaggcttcgacgccgcttcgttctaccatcgacaccaccacgctggcacccagttgatcggcgcgagatttaatcgccgcgacaatttgcgacggcgcgtgcagggccagactggaggtggcaacgccaatcagcaacgactgtttgcccgccagttgttgtgccacgcggttgggaatgtaattcagctccgccatcgccgcttccactttttcccgcgttttcgcagaaacgtggctggcctggttcaccacgcgggaaacggtctgataagagacaccggcatactctgcgacatcgtataacgttactggtttcacattcaccaccctgaattgactctcttccgggcgctatcatgccataccgcgaaaggttttgcgccattcgatggtgtc

SEQ ID NO: 5182 - DNA, 4011 bp, synthetic construct
  source 1..4011: mol_type = other DNA
tcactctagatttcagtgcaatttatctcttcaaatgtagcacctgaagtcagccccatacgatataagttgtaattctcatgttagtcatgccccgcgcccaccggaaggagctgactgggttgaaggctctcaagggcatcggtcgagatcccggtgcctaatgagtgagctaacttacattaattgcgttgcgctcactgcccgctttccagtcgggaaacctgtcgtgccagctgcattaatgaatcggccaacgcgcggggagaggcggtttgcgtattgggcgccagggtggtttttcttttcaccagtgagacgggcaacagctgattgcccttcaccgcctggccctgagagagttgcagcaagcggtccacgctggtttgccccagcaggcgaaaatcctgtttgatggtggttaacggcgggatataacatgagctgtcttcggtatcgtcgtatcccactaccgagatgtccgcaccaacgcgcagcccggactcggtaatggcgcgcattgcgcccagcgccatctgatcgttggcaaccagcatcgcagtgggaacgatgccctcattcagcatttgcatggtttgttgaaaaccggacatggcactccagtcgccttcccgttccgctatcggctgaatttgattgcgagtgagatatttatgccagccagccagacgcagacgcgccgagacagaacttaatgggcccgctaacagcgcgatttgctggtgacccaatgcgaccagatgctccacgcccagtcgcgtaccgtcttcatgggagaaaataatactgttgatgggtgtctggtcagagacatcaagaaataacgccggaacattagtgcaggcagcttccacagcaatggcatcctggtcatccagcggatagttaatgatcagcccactgacgcgttgcgcgagaagattgtgcaccgccgctttacaggcttcgacgccgcttcgttctaccatcgacaccaccacgctggcacccagttgatcggcgcgagatttaatcgccgcgacaatttgcgacggcgcgtgcagggccagactggaggtggcaacgccaatcagcaacgactgtttgcccgccagttgttgtgccacgcggttgggaatgtaattcagctccgccatcgccgcttccactttttcccgcgttttcgcagaaacgtggctggcctggttcaccacgcgggaaacggtctgataagagacaccggcatactctgcgacatcgtataacgttactggtttcacattcaccaccctgaattgactctcttccgggcgctatcatgccataccgcgaaaggttttgcgccattcgatggtgtccgggatctcgacgctctcccttatgcgactcctgcattaggaaattaatacgactcactataggggaattgtgagcggataacaattcccctgtagaaataattttgtttaactttaataaggagatataccatgagcaaaggagaagaacttttcactggagttgtcccaattcttgttgaattagatggtgatgttaatgggcacaaattttctgtccgtggagagggtgaaggtgatgctacaaacggaaaactcacccttaaatttatttgcactactggaaaactacctgttccgtggccaacacttgtcactactctgacctatggtgttcaatgcttttcccgttatccggatcacatgaaacggcatgactttttcaagagtgccatgcccgaaggttatgtacaggaacgcactatatctttcaaagatgacgggacctacaagacgcgtgctgaagtcaagtttgaaggtgatacccttgttaatcgtatcgagttaaagggtattgattttaaagaagatggaaacattcttggacacaaactcgagtacaactttaactcacacaatgtatacatcacggcagacaaacaaaagaatggaatcaaagctaacttcaaaattcgccacaacgttgaagatggttccgttcaactagcagaccattatcaacaaaatactccaattggcgatggccccgtccttttaccagacaaccattacctgtcgacacaatctgtcctttcgaaagatcccaacgaaaaggatgttggtggaggtggatcagaaggaggcctgagcaataactagcataaccccttggggcctctaaacgggtcttgaggggttttttgctgaaacctcaggcatttgagaagcacacggtcacactgcttccggtagtcaataaaccggtaaaccagcaatagacataagcggctatttaacgaccctgccctgaaccgacgacaagctgacgaccgggtctccgcaagtggcacttttcggggaaatgtgcgcggaacccctatttgtttatttttctaaatacattcaaatatgtatccgctcatgaattaattcttagaaaaactcatcgagcatcaaatgaaactgcaatttattcatatcaggattatcaataccatatttttgaaaaagccgtttctgtaatgaaggagaaaactcaccgaggcagttccataggatggcaagatcctggtatcggtctgcgattccgactcgtccaacatcaatacaacctattaatttcccctcgtcaaaaataaggttatcaagtgagaaatcaccatgagtgacgactgaatccggtgagaatggcaaaagtttatgcatttctttccagacttgttcaacaggccagccattacgctcgtcatcaaaatcactcgcatcaaccaaaccgttattcattcgtgattgcgcctgagcgagacgaaatacgcggtcgctgttaaaaggacaattacaaacaggaatcgaatgcaaccggcgcaggaacactgccagcgcatcaacaatattttcacctgaatcaggatattcttctaatacctggaatgctgttttcccggggatcgcagtggtgagtaaccatgcatcatcaggagtacggataaaatgcttgatggtcggaagaggcataaattccgtcagccagtttagtctgaccatctcatctgtaacatcattggcaacgctacctttgccatgtttcagaaacaactctggcgcatcgggcttcccatacaatcgatagattgtcgcacctgattgcccgacattatcgcgagcccatttatacccatataaatcagcatccatgttggaatttaatcgcggcctagagcaagacgtttcccgttgaatatggctcatactcttcctttttcaatattattgaagcatttatcagggttattgtctcatgagcggatacatatttgaatgtatttagaaaaataaacaaataggcatgctagcgcagaaacgtcctagaagatgccaggaggatacttagcagagagacaataaggccggagcgaagccgtttttccataggctccgcccccctgacgaacatcacgaaatctgacgctcaaatcagtggtggcgaaacccgacaggactataaagataccaggcgtttccccctgatggctccctcttgcgctctcctgttcccgtcctgcggcgtccgtgttgtggtggaggctttacccaaatcaccacgtcccgttccgtgtagacagttcgctccaagctgggctgtgtgcaagaaccccccgttcagcccgactgctgcgccttatccggtaactatcatcttgagtccaacccggaaagacacgacaaaacgccactggcagcagccattggtaactgagaattagtggatttagatatcgagagtcttgaagtggtggcctaacagaggctacactgaaaggacagtatttggtatctgcgctccactaaagccagttaccaggttaagcagttccccaactgacttaaccttcgatcaaaccgcctccccaggcggttttttcgtttacagagcaggagattacgacgatcgtaaaaggatctcaagaagatcctttacggattcccgacacca

SEQ ID NO: 5183 - DNA, 3719 bp, synthetic construct
  source 1..3719: mol_type = other DNA
gcgtgcagggccagactggaggtggcaacgccaatcagcaacgactgtttgcccgccagttgttgtgccacgcggttgggaatgtaattcagctccgccatcgccgcttccactttttcccgcgttttcgcagaaacgtggctggcctggttcaccacgcgggaaacggtctgataagagacaccggcatactctgcgacatcgtataacgttactggtttcacattcaccaccctgaattgactctcttccgggcgctatcatgccataccgcgaaaggttttgcgccattcgatggtgtccgggatctcgacgctctcccttatgcgactcctgcattaggaaattaatacgactcactataggggaattgtgagcggataacaattcccctgtagaaataattttgtttaactttaataaggagatataccatgggcagcagccatcaccatcatcaccacagccaggatccgaattcgagctcggcgcgcctgcaggtcgacaagcttgcggccgcataatgcttaagtcgaacagaaagtaatcgtattgtacacggccgcataatcgaaattaatacgactcactataggggaattgtgagcggataacaattccccatcttagtatattagttaagtataagaaggagatatacatatggcagatctcaattggatatcggccggccacgcgatcgctgacgtcggtaccctcgagtctggtaaagaaaccgctgctgcgaaatttgaacgccagcacatggactcgtctactagcgcagcttaattaacctaggctgctgccaccgctgagcaataactagcataaccccttggggcctctaaacgggtcttgaggggttttttgctgaaacctcaggcatttgagaagcacacggtcacactgcttccggtagtcaataaaccggtaaaccagcaatagacataagcggctatttaacgaccctgccctgaaccgacgacaagctgacgaccgggtctccgcaagtggcacttttcggggaaatgtgcgcggaacccctatttgtttatttttctaaatacattcaaatatgtatccgctcatgaattaattcttagaaaaactcatcgagcatcaaatgaaactgcaatttattcatatcaggattatcaataccatatttttgaaaaagccgtttctgtaatgaaggagaaaactcaccgaggcagttccataggatggcaagatcctggtatcggtctgcgattccgactcgtccaacatcaatacaacctattaatttcccctcgtcaaaaataaggttatcaagtgagaaatcaccatgagtgacgactgaatccggtgagaatggcaaaagtttatgcatttctttccagacttgttcaacaggccagccattacgctcgtcatcaaaatcactcgcatcaaccaaaccgttattcattcgtgattgcgcctgagcgagacgaaatacgcggtcgctgttaaaaggacaattacaaacaggaatcgaatgcaaccggcgcaggaacactgccagcgcatcaacaatattttcacctgaatcaggatattcttctaatacctggaatgctgttttcccggggatcgcagtggtgagtaaccatgcatcatcaggagtacggataaaatgcttgatggtcggaagaggcataaattccgtcagccagtttagtctgaccatctcatctgtaacatcattggcaacgctacctttgccatgtttcagaaacaactctggcgcatcgggcttcccatacaatcgatagattgtcgcacctgattgcccgacattatcgcgagcccatttatacccatataaatcagcatccatgttggaatttaatcgcggcctagagcaagacgtttcccgttgaatatggctcatactcttcctttttcaatattattgaagcatttatcagggttattgtctcatgagcggatacatatttgaatgtatttagaaaaataaacaaataggcatgctagcgcagaaacgtcctagaagatgccaggaggatacttagcagagagacaataaggccggagcgaagccgtttttccataggctccgcccccctgacgaacatcacgaaatctgacgctcaaatcagtggtggcgaaacccgacaggactataaagataccaggcgtttccccctgatggctccctcttgcgctctcctgttcccgtcctgcggcgtccgtgttgtggtggaggctttacccaaatcaccacgtcccgttccgtgtagacagttcgctccaagctgggctgtgtgcaagaaccccccgttcagcccgactgctgcgccttatccggtaactatcatcttgagtccaacccggaaagacacgacaaaacgccactggcagcagccattggtaactgagaattagtggatttagatatcgagagtcttgaagtggtggcctaacagaggctacactgaaaggacagtatttggtatctgcgctccactaaagccagttaccaggttaagcagttccccaactgacttaaccttcgatcaaaccgcctccccaggcggttttttcgtttacagagcaggagattacgacgatcgtaaaaggatctcaagaagatcctttacggattcccgacaccatcactctagatttcagtgcaatttatctcttcaaatgtagcacctgaagtcagccccatacgatataagttgtaattctcatgttagtcatgccccgcgcccaccggaaggagctgactgggttgaaggctctcaagggcatcggtcgagatcccggtgcctaatgagtgagctaacttacattaattgcgttgcgctcactgcccgctttccagtcgggaaacctgtcgtgccagctgcattaatgaatcggccaacgcgcggggagaggcggtttgcgtattgggcgccagggtggtttttcttttcaccagtgagacgggcaacagctgattgcccttcaccgcctggccctgagagagttgcagcaagcggtccacgctggtttgccccagcaggcgaaaatcctgtttgatggtggttaacggcgggatataacatgagctgtcttcggtatcgtcgtatcccactaccgagatgtccgcaccaacgcgcagcccggactcggtaatggcgcgcattgcgcccagcgccatctgatcgttggcaaccagcatcgcagtgggaacgatgccctcattcagcatttgcatggtttgttgaaaaccggacatggcactccagtcgccttcccgttccgctatcggctgaatttgattgcgagtgagatatttatgccagccagccagacgcagacgcgccgagacagaacttaatgggcccgctaacagcgcgatttgctggtgacccaatgcgaccagatgctccacgcccagtcgcgtaccgtcttcatgggagaaaataatactgttgatgggtgtctggtcagagacatcaagaaataacgccggaacattagtgcaggcagcttccacagcaatggcatcctggtcatccagcggatagttaatgatcagcccactgacgcgttgcgcgagaagattgtgcaccgccgctttacaggcttcgacgccgcttcgttctaccatcgacaccaccacgctggcacccagttgatcggcgcgagatttaatcgccgcgacaatttgcgacggc

SEQ ID NO: 5184 - DNA, 3754 bp, synthetic construct
  source 1..3754: mol_type = other DNA
cgcggaacccctatttgtttatttttctaaatacattcaaatatgtatccgctcatgagacaataaccctgataaatgcttcaataatattgaaaaaggaagagtatgagtattcaacatttccgtgtcgcccttattcccttttttgcggcattttgccttcctgtttttgctcacccagaaacgctggtgaaagtaaaagatgctgaagatcagttgggtgcacgagtgggttacatcgaactggatctcaacagcggtaagatccttgagagttttcgccccgaagaacgttttccaatgatgagcacttttaaagttctgctatgtggcgcggtattatcccgtattgacgccgggcaagagcaactcggtcgccgcatacactattctcagaatgacttggttgagtactcaccagtcacagaaaagcatcttacggatggcatgacagtaagagaattatgcagtgctgccataaccatgagtgataacactgcggccaacttacttctgacaacgatcggaggaccgaaggagctaaccgcttttttgcacaacatgggggatcatgtaactcgccttgatcgttgggaaccggagctgaatgaagccataccaaacgacgagcgtgacaccacgatgcctgtagcaatggcaacaacgttgcgcaaactattaactggcgaactacttactctagcttcccggcaacaattaatagactggatggaggcggataaagttgcaggaccacttctgcgctcggcccttccggctggctggtttattgctgataaatctggagccggtgagcgtgggtctcgcggtatcattgcagcactggggccagatggtaagccctcccgtatcgtagttatctacacgacggggagtcaggcaactatggatgaacgaaatagacagatcgctgagataggtgcctcactgattaagcattggtaactgtcagaccaagtttactcatatatactttagattgatttaaaacttcatttttaatttaaaaggatctaggtgaagatcctttttgataatctcatgaccaaaatcccttaacgtgagttttcgttccactgagcgtcagaccccgtagaaaagatcaaaggatcttcttgagatcctttttttctgcgcgtaatctgctgcttgcaaacaaaaaaaccaccgctaccagcggtggtttgtttgccggatcaagagctaccaactctttttccgaaggtaactggcttcagcagagcgcagataccaaatactgttcttctagtgtagccgtagttaggccaccacttcaagaactctgtagcaccgcctacatacctcgctctgctaatcctgttaccagtggctgctgccagtggcgataagtcgtgtcttaccgggttggactcaagacgatagttaccggataaggcgcagcggtcgggctgaacggggggttcgtgcacacagcccagcttggagcgaacgacctacaccgaactgagatacctacagcgtgagctatgagaaagcgccacgcttcccgaagggagaaaggcggacaggtatccggtaagcggcagggtcggaacaggagagcgcacgagggagcttccagggggaaacgcctggtatctttatagtcctgtcgggtttcgccacctctgacttgagcgtcgatttttgtgatgctcgtcaggggggcggagcctatggaaaaacgccagcaacgcggcctttttacggttcctggccttttgctggccttttgctcacatgttctttcctgcgttatcccctgattctgtggataaccgtattaccgcctttgagtgagctgataccgctcgccgcagccgaacgaccgagcgcagcgagtcagtgagcgaggaagcggaagagcgcccaatacgcaaaccgcctctccccgcgcgttggccgattcattaatgcagctggcacgacaggtttcccgactggaaagcgggcagtgagcgcaacgcaattaatgtgagttagctcactcattaggcaccccaggctttacactttatgcttccggctcgtatgttgtgtggaattgtgagcggataacaatttcacacaggaaacagctatgaccatgattacgccaagctttgttgatacaaccataaaatgataattacacccataaattgataattatcacacccataaattgatattgcctcttcatggtctaaacttcagtaagtttacgacattttcatgaagaggtcatttccggggatccttggcgaaaatgagacgttgatcggcacgtaagaggttccaactttcaccataatgaaataagatcactaccgggcgtattttttgagttatcgagattttcaggagctaaggaagctaaaatgcgtgaccacatggtccttcttgagtttgtaactgctgctgggattacacatggctgataacattttgaggcatttcagtcagttgctcaatgtacctataaccagaccgttcagctggatattacggcctttttaaagaccgtaaagaaaaataagcacaagttttatccggcctttattcacattcttgcccgcctgatgaatgctcatccggagttccgtatggcaatgaaagacggtgagctggtgatatgggatagtgttcacccttgttacaccgttttccatgagcaaactgaaacgttttcatcgctctggagtgaataccacgacgatttccggcagtttctacacatatattcgcaagatgtggcgtgttacggtgaaaacctggcctatttccctaaagggtttattgagaatatgtttttcgtctcagccaatccctgggtgagtttcaccagttttgatttaaacgtggccaatatggacaacttcttcgcccccgttttcactatgggcaaatattatacgcaaggcgacaaggtgctgatgccgctggcgattcaggttcatcatgccgtttgtgatggcttccatgtcggcagaatgcttaatgaattacaacagtactgcgatgagtggcagggcggggcgtaatttttttaaggcagttattggtgcccttctagagtccttactgcagtagttttgctgaaatactcgattcacaaaaatatcaacttatggttgttttgtgagatatcaatatatggttgttttgtggttaagttgctgattataaataattattaaatatcactttatggttgcatcaacaggtaccgagctcgaattcactggccgtcgttttacaacgtcgtgactgggaaaaccctggcgttacccaacttaatcgccttgcagcacatccccctttcgccagctggcgtaatagcgaagaggcccgcaccgatcgcccttcccaacagttgcgcagcctgaatggcgaatggcgcctgatgcggtattttctccttacgcatctgtgcggtatttcacaccgcatatggtgcactctcagtacaatctgctctgatgccgcatagttaagccagccccgacacccgccaacacccgctgacgcgccctgacgggcttgtctgctcccggcatccgcttacagacaagctgtgaccgtctccgggagctgcatgtgtcagaggttttcaccgtcatcaccgaaacgcgcgagacgaaagggcctcgtgatacgcctatttttataggttaatgtcatgataataatggtttcttagacgtcaggtggcacttttcggggaaatgtg

SEQ ID NO: 5185 - DNA, 2840 bp, synthetic construct
  source 1..2840: mol_type = other DNA
ttgagatcctttttttctgcgcgtaatctgctgcttgcaaacaaaaaaaccaccgctaccagcggtggtttgtttgccggatcaagagctaccaactctttttccgaaggtaactggcttcagcagagcgcagataccaaatactgttcttctagtgtagccgtagttaggccaccacttcaagaactctgtagcaccgcctacatacctcgctctgctaatcctgttaccagtggctgctgccagtggcgataagtcgtgtcttaccgggttggactcaagacgatagttaccggataaggcgcagcggtcgggctgaacggggggttcgtgcacacagcccagcttggagcgaacgacctacaccgaactgagatacctacagcgtgagctatgagaaagcgccacgcttcccgaagggagaaaggcggacaggtatccggtaagcggcagggtcggaacaggagagcgcacgagggagcttccagggggaaacgcctggtatctttatagtcctgtcgggtttcgccacctctgacttgagcgtcgatttttgtgatgctcgtcaggggggcggagcctatggaaaaacgccagcaacgcggcctttttacggttcctggccttttgctggccttttgctcacatgttctttcctgcgttatcccctgattctgtggataaccgtattaccgcctttgagtgagctgataccgctcgccgcagccgaacgaccgagcgcagcgagtcagtgagcgaggaagcggaagagcgtatgtgcagctaactctcacatttgttgatacaaccataaaatgataattacacccataaattgataattatcacacccaggaggtagtgctggaggtggatctcgtgaccacatggtccttcttgagtttgtaactgctgctgggattacacatggctgagcaataactagcataaccccttggggcctctaaacgggtcttgaggggttttttgctgaaacctcaggcatttgagaagcacacggtcacaccactacaagggaaacatgccagtcagttgctcaatgtacctataaccagaccgttcagctggatattacggcctttttaaagaccgtaaagaaaaataagcacaagttttatccggcctttattcacattcttgcccgcctgatgaatgctcatccggagttccgtatggcaatgaaagacggtgagctggtgatatgggatagtgttcacccttgttacaccgttttccatgagcaaactgaaacgttttcatcgctctggagtgaataccacgacgatttccggcagtttctacacatatattcgcaagatgtggcgtgttacggtgaaaacctggcctatttccctaaagggtttattgagaatatgtttttcgtctcagccaatccctgggtgagtttcaccagttttggtgaaaccacttagcttcggcggccgcctctctgacacgcagtaagtgatgaccaattcttactgcagtagttttgctgaaatactcgattcacaaaaatatcaacttatggttgttttgtgagatatcaatatatggttgttttgtggttaagttgctgattataaataattattaaatatcactttatggttgcatcaacaacattcactgtaatgcgagcttcaccatgggacgtcaggtggcacttttcggggaaatgtgcgcggaacccctatttgtttatttttctaaatacattcaaatatgtatccgctcatgagacaataaccctgataaatgcttcaataatattgaaaaaggaagagtatgagtattcaacatttccgtgtcgcccttattcccttttttgcggcattttgccttcctgtttttgctcacccagaaacgctggtgaaagtaaaagatgctgaagatcagttgggtgcacgagtgggttacatcgaactggatctcaacagcggtaagatccttgagagttttcgccccgaagaacgttttccaatgatgagcacttttaaagttctgctatgtggcgcggtattatcccgtattgacgccgggcaagagcaactcggtcgccgcatacactattctcagaatgacttggttgagtactcaccagtcacagaaaagcatcttacggatggcatgacagtaagagaattatgcagtgctgccataaccatgagtgataacactgcggccaacttacttctgacaacgatcggaggaccgaaggagctaaccgcttttttgcacaacatgggggatcatgtaactcgccttgatcgttgggaaccggagctgaatgaagccataccaaacgacgagcgtgacaccacgatgcctgtagcaatggcaacaacgttgcgcaaactattaactggcgaactacttactctagcttcccggcaacaattaatagactggatggaggcggataaagttgcaggaccacttctgcgctcggcccttccggctggctggtttattgctgataaatctggagccggtgagcgtgggtctcgcggtatcattgcagcactggggccagatggtaagccctcccgtatcgtagttatctacacgacggggagtcaggcaactatggatgaacgaaatagacagatcgctgagataggtgcctcactgattaagcattggtaactgtcagaccaagtttactcatatatactttagattgatttaaaacttcatttttaatttaaaaggatctaggtgaagatcctttttgataatctcatgaccaaaatcccttaacgtgagttttcgttccactgagcgtcagaccccgtagaaaagatcaaaggatcttc

SEQ ID NO: 5186 - DNA, 4258 bp, synthetic construct
  source 1..4258: mol_type = other DNA
cccgacattatcgcgagcccatttatacccatataaatcagcatccatgttggaatttaatcgcggcctagagcaagacgtttcccgttgaatatggctcatactcttcctttttcaatattattgaagcatttatcagggttattgtctcatgagcggatacatatttgaatgtatttagaaaaataaacaaataggcatgctagcgcagaaacgtcctagaagatgccaggaggatacttagcagagagacaataaggccggagcgaagccgtttttccataggctccgcccccctgacgaacatcacgaaatctgacgctcaaatcagtggtggcgaaacccgacaggactataaagataccaggcgtttccccctgatggctccctcttgcgctctcctgttcccgtcctgcggcgtccgtgttgtggtggaggctttacccaaatcaccacgtcccgttccgtgtagacagttcgctccaagctgggctgtgtgcaagaaccccccgttcagcccgactgctgcgccttatccggtaactatcatcttgagtccaacccggaaagacacgacaaaacgccactggcagcagccattggtaactgagaattagtggatttagatatcgagagtcttgaagtggtggcctaacagaggctacactgaaaggacagtatttggtatctgcgctccactaaagccagttaccaggttaagcagttccccaactgacttaaccttcgatcaaaccgcctccccaggcggttttttcgtttacagagcaggagattacgacgatcgtaaaaggatctcaagaagatcctttacggattcccgacaccatcactctagatttcagtgcaatttatctcttcaaatgtagcacctgaagtcagccccatacgatataagttgtaattctcatgttagtcatgccccgcgcccaccggaaggagctgactgggttgaaggctctcaagggcatcggtcgagatcccggtgcctaatgagtgagctaacttacattaattgcgttgcgctcactgcccgctttccagtcgggaaacctgtcgtgccagctgcattaatgaatcggccaacgcgcggggagaggcggtttgcgtattgggcgccagggtggtttttcttttcaccagtgagacgggcaacagctgattgcccttcaccgcctggccctgagagagttgcagcaagcggtccacgctggtttgccccagcaggcgaaaatcctgtttgatggtggttaacggcgggatataacatgagctgtcttcggtatcgtcgtatcccactaccgagatgtccgcaccaacgcgcagcccggactcggtaatggcgcgcattgcgcccagcgccatctgatcgttggcaaccagcatcgcagtgggaacgatgccctcattcagcatttgcatggtttgttgaaaaccggacatggcactccagtcgccttcccgttccgctatcggctgaatttgattgcgagtgagatatttatgccagccagccagacgcagacgcgccgagacagaacttaatgggcccgctaacagcgcgatttgctggtgacccaatgcgaccagatgctccacgcccagtcgcgtaccgtcttcatgggagaaaataatactgttgatgggtgtctggtcagagacatcaagaaataacgccggaacattagtgcaggcagcttccacagcaatggcatcctggtcatccagcggatagttaatgatcagcccactgacgcgttgcgcgagaagattgtgcaccgccgctttacaggcttcgacgccgcttcgttctaccatcgacaccaccacgctggcacccagttgatcggcgcgagatttaatcgccgcgacaatttgcgacggcgcgtgcagggccagactggaggtggcaacgccaatcagcaacgactgtttgcccgccagttgttgtgccacgcggttgggaatgtaattcagctccgccatcgccgcttccactttttcccgcgttttcgcagaaacgtggctggcctggttcaccacgcgggaaacggtctgataagagacaccggcatactctgcgacatcgtataacgttactggtttcacattcaccaccctgaattgactctcttccgggcgctatcatgccataccgcgaaaggttttgcgccattcgatggtgtccgggatctcgacgctctcccttatgcgactcctgcattaggaaattaatacgactcactataggggaattgtgagcggataacaattcccctgtagaaataattttgtttaactttaataaggagatataccatgagcaaaggagaagaacttttcactggagttgtcccaattcttgttgaattagatggtgatgttaatgggcacaaattttctgtccgtggagagggtgaaggtgatgctacaaacggaaaactcacccttaaatttatttgcactactggaaaactacctgttccgtggccaacacttgtcactactctgacctatggtgttcaatgcttttcccgttatccggatcacatgaaacggcatgactttttcaagagtgccatgcccgaaggttatgtacaggaacgcactatatctttcaaagatgacgggacctacaagacgcgtgctgaagtcaagtttgaaggtgatacccttgttaatcgtatcgagttaaagggtattgattttaaagaagatggaaacattcttggacacaaactcgagtacaactttaactcacacaatgtatacatcacggcagacaaacaaaagaatggaatcaaagctaacttcaaaattcgccacaacgttgaagatggttccgttcaactagcagaccattatcaacaaaatactccaattggcgatggccccgtccttttaccagacaaccattacctgtcgacacaatctgtcctttcgaaagatcccaacgaaaaggatgttggtggaggttgttgatacaaccataaaatgataattacacccataaattgataattatcacacccaggaggtagtgctggaggtggatctcgtgaccacatggtccttcttgagtttgtaactgctgctgggattacacatggctgagcaataactagcataaccccttggggcctctaaacgggtcttgaggggttttttgctgaaacctcaggcatttgagaagcacacggtcacaccactacaagggaaacatggatcagaaggaggcctgagcaataactagcataaccccttggggcctctaaacgggtcttgaggggttttttgctgaaacctcaggcatttgagaagcacacggtcacactgcttccggtagtcaataaaccggtaaaccagcaatagacataagcggctatttaacgaccctgccctgaaccgacgacaagctgacgaccgggtctccgcaagtggcacttttcggggaaatgtgcgcggaacccctatttgtttatttttctaaatacattcaaatatgtatccgctcatgaattaattcttagaaaaactcatcgagcatcaaatgaaactgcaatttattcatatcaggattatcaataccatatttttgaaaaagccgtttctgtaatgaaggagaaaactcaccgaggcagttccataggatggcaagatcctggtatcggtctgcgattccgactcgtccaacatcaatacaacctattaatttcccctcgtcaaaaataaggttatcaagtgagaaatcaccatgagtgacgactgaatccggtgagaatggcaaaagtttatgcatttctttccagacttgttcaacaggccagccattacgctcgtcatcaaaatcactcgcatcaaccaaaccgttattcattcgtgattgcgcctgagcgagacgaaatacgcggtcgctgttaaaaggacaattacaaacaggaatcgaatgcaaccggcgcaggaacactgccagcgcatcaacaatattttcacctgaatcaggatattcttctaatacctggaatgctgttttcccggggatcgcagtggtgagtaaccatgcatcatcaggagtacggataaaatgcttgatggtcggaagaggcataaattccgtcagccagtttagtctgaccatctcatctgtaacatcattggcaacgctacctttgccatgtttcagaaacaactctggcgcatcgggcttcccatacaatcgatagattgtcgcacctgattg

SEQ ID NO: 5187 - DNA, 4258 bp, synthetic construct
  source 1..4258: mol_type = other DNA
tcactctagatttcagtgcaatttatctcttcaaatgtagcacctgaagtcagccccatacgatataagttgtaattctcatgttagtcatgccccgcgcccaccggaaggagctgactgggttgaaggctctcaagggcatcggtcgagatcccggtgcctaatgagtgagctaacttacattaattgcgttgcgctcactgcccgctttccagtcgggaaacctgtcgtgccagctgcattaatgaatcggccaacgcgcggggagaggcggtttgcgtattgggcgccagggtggtttttcttttcaccagtgagacgggcaacagctgattgcccttcaccgcctggccctgagagagttgcagcaagcggtccacgctggtttgccccagcaggcgaaaatcctgtttgatggtggttaacggcgggatataacatgagctgtcttcggtatcgtcgtatcccactaccgagatgtccgcaccaacgcgcagcccggactcggtaatggcgcgcattgcgcccagcgccatctgatcgttggcaaccagcatcgcagtgggaacgatgccctcattcagcatttgcatggtttgttgaaaaccggacatggcactccagtcgccttcccgttccgctatcggctgaatttgattgcgagtgagatatttatgccagccagccagacgcagacgcgccgagacagaacttaatgggcccgctaacagcgcgatttgctggtgacccaatgcgaccagatgctccacgcccagtcgcgtaccgtcttcatgggagaaaataatactgttgatgggtgtctggtcagagacatcaagaaataacgccggaacattagtgcaggcagcttccacagcaatggcatcctggtcatccagcggatagttaatgatcagcccactgacgcgttgcgcgagaagattgtgcaccgccgctttacaggcttcgacgccgcttcgttctaccatcgacaccaccacgctggcacccagttgatcggcgcgagatttaatcgccgcgacaatttgcgacggcgcgtgcagggccagactggaggtggcaacgccaatcagcaacgactgtttgcccgccagttgttgtgccacgcggttgggaatgtaattcagctccgccatcgccgcttccactttttcccgcgttttcgcagaaacgtggctggcctggttcaccacgcgggaaacggtctgataagagacaccggcatactctgcgacatcgtataacgttactggtttcacattcaccaccctgaattgactctcttccgggcgctatcatgccataccgcgaaaggttttgcgccattcgatggtgtccgggatctcgacgctctcccttatgcgactcctgcattaggaaattaatacgactcactataggggaattgtgagcggataacaattcccctgtagaaataattttgtttaactttaataaggagatataccatgagcaaaggagaagaacttttcactggagttgtcccaattcttgttgaattagatggtgatgttaatgggcacaaattttctgtccgtggagagggtgaaggtgatgctacaaacggaaaactcacccttaaatttatttgcactactggaaaactacctgttccgtggccaacacttgtcactactctgacctatggtgttcaatgcttttcccgttatccggatcacatgaaacggcatgactttttcaagagtgccatgcccgaaggttatgtacaggaacgcactatatctttcaaagatgacgggacctacaagacgcgtgctgaagtcaagtttgaaggtgatacccttgttaatcgtatcgagttaaagggtattgattttaaagaagatggaaacattcttggacacaaactcgagtacaactttaactcacacaatgtatacatcacggcagacaaacaaaagaatggaatcaaagctaacttcaaaattcgccacaacgttgaagatggttccgttcaactagcagaccattatcaacaaaatactccaattggcgatggccccgtccttttaccagacaaccattacctgtcgacacaatctgtcctttcgaaagatcccaacgaaaaggatgttggtggaggttgtggatacaaccataaaatgataattacacccataaatggatcattatcacccccaggaggtagtgctggaggtggatctcgtgaccacatggtccttcttgagtttgtaactgctgctgggattacacatggctgagcaataactagcataaccccttggggcctctaaacgggtcttgaggggttttttgctgaaacctcaggcatttgagaagcacacggtcacaccactacaagggaaacatggatcagaaggaggcctgagcaataactagcataaccccttggggcctctaaacgggtcttgaggggttttttgctgaaacctcaggcatttgagaagcacacggtcacactgcttccggtagtcaataaaccggtaaaccagcaatagacataagcggctatttaacgaccctgccctgaaccgacgacaagctgacgaccgggtctccgcaagtggcacttttcggggaaatgtgcgcggaacccctatttgtttatttttctaaatacattcaaatatgtatccgctcatgaattaattcttagaaaaactcatcgagcatcaaatgaaactgcaatttattcatatcaggattatcaataccatatttttgaaaaagccgtttctgtaatgaaggagaaaactcaccgaggcagttccataggatggcaagatcctggtatcggtctgcgattccgactcgtccaacatcaatacaacctattaatttcccctcgtcaaaaataaggttatcaagtgagaaatcaccatgagtgacgactgaatccggtgagaatggcaaaagtttatgcatttctttccagacttgttcaacaggccagccattacgctcgtcatcaaaatcactcgcatcaaccaaaccgttattcattcgtgattgcgcctgagcgagacgaaatacgcggtcgctgttaaaaggacaattacaaacaggaatcgaatgcaaccggcgcaggaacactgccagcgcatcaacaatattttcacctgaatcaggatattcttctaatacctggaatgctgttttcccggggatcgcagtggtgagtaaccatgcatcatcaggagtacggataaaatgcttgatggtcggaagaggcataaattccgtcagccagtttagtctgaccatctcatctgtaacatcattggcaacgctacctttgccatgtttcagaaacaactctggcgcatcgggcttcccatacaatcgatagattgtcgcacctgattgcccgacattatcgcgagcccatttatacccatataaatcagcatccatgttggaatttaatcgcggcctagagcaagacgtttcccgttgaatatggctcatactcttcctttttcaatattattgaagcatttatcagggttattgtctcatgagcggatacatatttgaatgtatttagaaaaataaacaaataggcatgctagcgcagaaacgtcctagaagatgccaggaggatacttagcagagagacaataaggccggagcgaagccgtttttccataggctccgcccccctgacgaacatcacgaaatctgacgctcaaatcagtggtggcgaaacccgacaggactataaagataccaggcgtttccccctgatggctccctcttgcgctctcctgttcccgtcctgcggcgtccgtgttgtggtggaggctttacccaaatcaccacgtcccgttccgtgtagacagttcgctccaagctgggctgtgtgcaagaaccccccgttcagcccgactgctgcgccttatccggtaactatcatcttgagtccaacccggaaagacacgacaaaacgccactggcagcagccattggtaactgagaattagtggatttagatatcgagagtcttgaagtggtggcctaacagaggctacactgaaaggacagtatttggtatctgcgctccactaaagccagttaccaggttaagcagttccccaactgacttaaccttcgatcaaaccgcctccccaggcggttttttcgtttacagagcaggagattacgacgatcgtaaaaggatctcaagaagatcctttacggattcccgacacca

SEQ ID NO: 5188 - DNA, 4258 bp, synthetic construct
  source 1..4258: mol_type = other DNA
tcactctagatttcagtgcaatttatctcttcaaatgtagcacctgaagtcagccccatacgatataagttgtaattctcatgttagtcatgccccgcgcccaccggaaggagctgactgggttgaaggctctcaagggcatcggtcgagatcccggtgcctaatgagtgagctaacttacattaattgcgttgcgctcactgcccgctttccagtcgggaaacctgtcgtgccagctgcattaatgaatcggccaacgcgcggggagaggcggtttgcgtattgggcgccagggtggtttttcttttcaccagtgagacgggcaacagctgattgcccttcaccgcctggccctgagagagttgcagcaagcggtccacgctggtttgccccagcaggcgaaaatcctgtttgatggtggttaacggcgggatataacatgagctgtcttcggtatcgtcgtatcccactaccgagatgtccgcaccaacgcgcagcccggactcggtaatggcgcgcattgcgcccagcgccatctgatcgttggcaaccagcatcgcagtgggaacgatgccctcattcagcatttgcatggtttgttgaaaaccggacatggcactccagtcgccttcccgttccgctatcggctgaatttgattgcgagtgagatatttatgccagccagccagacgcagacgcgccgagacagaacttaatgggcccgctaacagcgcgatttgctggtgacccaatgcgaccagatgctccacgcccagtcgcgtaccgtcttcatgggagaaaataatactgttgatgggtgtctggtcagagacatcaagaaataacgccggaacattagtgcaggcagcttccacagcaatggcatcctggtcatccagcggatagttaatgatcagcccactgacgcgttgcgcgagaagattgtgcaccgccgctttacaggcttcgacgccgcttcgttctaccatcgacaccaccacgctggcacccagttgatcggcgcgagatttaatcgccgcgacaatttgcgacggcgcgtgcagggccagactggaggtggcaacgccaatcagcaacgactgtttgcccgccagttgttgtgccacgcggttgggaatgtaattcagctccgccatcgccgcttccactttttcccgcgttttcgcagaaacgtggctggcctggttcaccacgcgggaaacggtctgataagagacaccggcatactctgcgacatcgtataacgttactggtttcacattcaccaccctgaattgactctcttccgggcgctatcatgccataccgcgaaaggttttgcgccattcgatggtgtccgggatctcgacgctctcccttatgcgactcctgcattaggaaattaatacgactcactataggggaattgtgagcggataacaattcccctgtagaaataattttgtttaactttaataaggagatataccatgagcaaaggagaagaacttttcactggagttgtcccaattcttgttgaattagatggtgatgttaatgggcacaaattttctgtccgtggagagggtgaaggtgatgctacaaacggaaaactcacccttaaatttatttgcactactggaaaactacctgttccgtggccaacacttgtcactactctgacctatggtgttcaatgcttttcccgttatccggatcacatgaaacggcatgactttttcaagagtgccatgcccgaaggttatgtacaggaacgcactatatctttcaaagatgacgggacctacaagacgcgtgctgaagtcaagtttgaaggtgatacccttgttaatcgtatcgagttaaagggtattgattttaaagaagatggaaacattcttggacacaaactcgagtacaactttaactcacacaatgtatacatcacggcagacaaacaaaagaatggaatcaaagctaacttcaaaattcgccacaacgttgaagatggttccgttcaactagcagaccattatcaacaaaatactccaattggcgatggccccgtccttttaccagacaaccattacctgtcgacacaatctgtcctttcgaaagatcccaacgaaaaggatgttggtggaggttgtggatacaaccataaaacgataattacacccataaatggatcattatcacacccaggaggtagtgctggaggtggatctcgtgaccacatggtccttcttgagtttgtaactgctgctgggattacacatggctgagcaataactagcataaccccttggggcctctaaacgggtcttgaggggttttttgctgaaacctcaggcatttgagaagcacacggtcacaccactacaagggaaacatggatcagaaggaggcctgagcaataactagcataaccccttggggcctctaaacgggtcttgaggggttttttgctgaaacctcaggcatttgagaagcacacggtcacactgcttccggtagtcaataaaccggtaaaccagcaatagacataagcggctatttaacgaccctgccctgaaccgacgacaagctgacgaccgggtctccgcaagtggcacttttcggggaaatgtgcgcggaacccctatttgtttatttttctaaatacattcaaatatgtatccgctcatgaattaattcttagaaaaactcatcgagcatcaaatgaaactgcaatttattcatatcaggattatcaataccatatttttgaaaaagccgtttctgtaatgaaggagaaaactcaccgaggcagttccataggatggcaagatcctggtatcggtctgcgattccgactcgtccaacatcaatacaacctattaatttcccctcgtcaaaaataaggttatcaagtgagaaatcaccatgagtgacgactgaatccggtgagaatggcaaaagtttatgcatttctttccagacttgttcaacaggccagccattacgctcgtcatcaaaatcactcgcatcaaccaaaccgttattcattcgtgattgcgcctgagcgagacgaaatacgcggtcgctgttaaaaggacaattacaaacaggaatcgaatgcaaccggcgcaggaacactgccagcgcatcaacaatattttcacctgaatcaggatattcttctaatacctggaatgctgttttcccggggatcgcagtggtgagtaaccatgcatcatcaggagtacggataaaatgcttgatggtcggaagaggcataaattccgtcagccagtttagtctgaccatctcatctgtaacatcattggcaacgctacctttgccatgtttcagaaacaactctggcgcatcgggcttcccatacaatcgatagattgtcgcacctgattgcccgacattatcgcgagcccatttatacccatataaatcagcatccatgttggaatttaatcgcggcctagagcaagacgtttcccgttgaatatggctcatactcttcctttttcaatattattgaagcatttatcagggttattgtctcatgagcggatacatatttgaatgtatttagaaaaataaacaaataggcatgctagcgcagaaacgtcctagaagatgccaggaggatacttagcagagagacaataaggccggagcgaagccgtttttccataggctccgcccccctgacgaacatcacgaaatctgacgctcaaatcagtggtggcgaaacccgacaggactataaagataccaggcgtttccccctgatggctccctcttgcgctctcctgttcccgtcctgcggcgtccgtgttgtggtggaggctttacccaaatcaccacgtcccgttccgtgtagacagttcgctccaagctgggctgtgtgcaagaaccccccgttcagcccgactgctgcgccttatccggtaactatcatcttgagtccaacccggaaagacacgacaaaacgccactggcagcagccattggtaactgagaattagtggatttagatatcgagagtcttgaagtggtggcctaacagaggctacactgaaaggacagtatttggtatctgcgctccactaaagccagttaccaggttaagcagttccccaactgacttaaccttcgatcaaaccgcctccccaggcggttttttcgtttacagagcaggagattacgacgatcgtaaaaggatctcaagaagatcctttacggattcccgacacca

SEQ ID NO: 5189 - DNA, 4258 bp, synthetic construct
  source 1..4258: mol_type = other DNA
tcactctagatttcagtgcaatttatctcttcaaatgtagcacctgaagtcagccccatacgatataagttgtaattctcatgttagtcatgccccgcgcccaccggaaggagctgactgggttgaaggctctcaagggcatcggtcgagatcccggtgcctaatgagtgagctaacttacattaattgcgttgcgctcactgcccgctttccagtcgggaaacctgtcgtgccagctgcattaatgaatcggccaacgcgcggggagaggcggtttgcgtattgggcgccagggtggtttttcttttcaccagtgagacgggcaacagctgattgcccttcaccgcctggccctgagagagttgcagcaagcggtccacgctggtttgccccagcaggcgaaaatcctgtttgatggtggttaacggcgggatataacatgagctgtcttcggtatcgtcgtatcccactaccgagatgtccgcaccaacgcgcagcccggactcggtaatggcgcgcattgcgcccagcgccatctgatcgttggcaaccagcatcgcagtgggaacgatgccctcattcagcatttgcatggtttgttgaaaaccggacatggcactccagtcgccttcccgttccgctatcggctgaatttgattgcgagtgagatatttatgccagccagccagacgcagacgcgccgagacagaacttaatgggcccgctaacagcgcgatttgctggtgacccaatgcgaccagatgctccacgcccagtcgcgtaccgtcttcatgggagaaaataatactgttgatgggtgtctggtcagagacatcaagaaataacgccggaacattagtgcaggcagcttccacagcaatggcatcctggtcatccagcggatagttaatgatcagcccactgacgcgttgcgcgagaagattgtgcaccgccgctttacaggcttcgacgccgcttcgttctaccatcgacaccaccacgctggcacccagttgatcggcgcgagatttaatcgccgcgacaatttgcgacggcgcgtgcagggccagactggaggtggcaacgccaatcagcaacgactgtttgcccgccagttgttgtgccacgcggttgggaatgtaattcagctccgccatcgccgcttccactttttcccgcgttttcgcagaaacgtggctggcctggttcaccacgcgggaaacggtctgataagagacaccggcatactctgcgacatcgtataacgttactggtttcacattcaccaccctgaattgactctcttccgggcgctatcatgccataccgcgaaaggttttgcgccattcgatggtgtccgggatctcgacgctctcccttatgcgactcctgcattaggaaattaatacgactcactataggggaattgtgagcggataacaattcccctgtagaaataattttgtttaactttaataaggagatataccatgagcaaaggagaagaacttttcactggagttgtcccaattcttgttgaattagatggtgatgttaatgggcacaaattttctgtccgtggagagggtgaaggtgatgctacaaacggaaaactcacccttaaatttatttgcactactggaaaactacctgttccgtggccaacacttgtcactactctgacctatggtgttcaatgcttttcccgttatccggatcacatgaaacggcatgactttttcaagagtgccatgcccgaaggttatgtacaggaacgcactatatctttcaaagatgacgggacctacaagacgcgtgctgaagtcaagtttgaaggtgatacccttgttaatcgtatcgagttaaagggtattgattttaaagaagatggaaacattcttggacacaaactcgagtacaactttaactcacacaatgtatacatcacggcagacaaacaaaagaatggaatcaaagctaacttcaaaattcgccacaacgttgaagatggttccgttcaactagcagaccattatcaacaaaatactccaattggcgatggccccgtccttttaccagacaaccattacctgtcgacacaatctgtcctttcgaaagatcccaacgaaaaggatgttggtggaggttgtggatccaaccataaaatgataattacacccataaatggatcattatcacacccaggaggtagtgctggaggtggatctcgtgaccacatggtccttcttgagtttgtaactgctgctgggattacacatggctgagcaataactagcataaccccttggggcctctaaacgggtcttgaggggttttttgctgaaacctcaggcatttgagaagcacacggtcacaccactacaagggaaacatggatcagaaggaggcctgagcaataactagcataaccccttggggcctctaaacgggtcttgaggggttttttgctgaaacctcaggcatttgagaagcacacggtcacactgcttccggtagtcaataaaccggtaaaccagcaatagacataagcggctatttaacgaccctgccctgaaccgacgacaagctgacgaccgggtctccgcaagtggcacttttcggggaaatgtgcgcggaacccctatttgtttatttttctaaatacattcaaatatgtatccgctcatgaattaattcttagaaaaactcatcgagcatcaaatgaaactgcaatttattcatatcaggattatcaataccatatttttgaaaaagccgtttctgtaatgaaggagaaaactcaccgaggcagttccataggatggcaagatcctggtatcggtctgcgattccgactcgtccaacatcaatacaacctattaatttcccctcgtcaaaaataaggttatcaagtgagaaatcaccatgagtgacgactgaatccggtgagaatggcaaaagtttatgcatttctttccagacttgttcaacaggccagccattacgctcgtcatcaaaatcactcgcatcaaccaaaccgttattcattcgtgattgcgcctgagcgagacgaaatacgcggtcgctgttaaaaggacaattacaaacaggaatcgaatgcaaccggcgcaggaacactgccagcgcatcaacaatattttcacctgaatcaggatattcttctaatacctggaatgctgttttcccggggatcgcagtggtgagtaaccatgcatcatcaggagtacggataaaatgcttgatggtcggaagaggcataaattccgtcagccagtttagtctgaccatctcatctgtaacatcattggcaacgctacctttgccatgtttcagaaacaactctggcgcatcgggcttcccatacaatcgatagattgtcgcacctgattgcccgacattatcgcgagcccatttatacccatataaatcagcatccatgttggaatttaatcgcggcctagagcaagacgtttcccgttgaatatggctcatactcttcctttttcaatattattgaagcatttatcagggttattgtctcatgagcggatacatatttgaatgtatttagaaaaataaacaaataggcatgctagcgcagaaacgtcctagaagatgccaggaggatacttagcagagagacaataaggccggagcgaagccgtttttccataggctccgcccccctgacgaacatcacgaaatctgacgctcaaatcagtggtggcgaaacccgacaggactataaagataccaggcgtttccccctgatggctccctcttgcgctctcctgttcccgtcctgcggcgtccgtgttgtggtggaggctttacccaaatcaccacgtcccgttccgtgtagacagttcgctccaagctgggctgtgtgcaagaaccccccgttcagcccgactgctgcgccttatccggtaactatcatcttgagtccaacccggaaagacacgacaaaacgccactggcagcagccattggtaactgagaattagtggatttagatatcgagagtcttgaagtggtggcctaacagaggctacactgaaaggacagtatttggtatctgcgctccactaaagccagttaccaggttaagcagttccccaactgacttaaccttcgatcaaaccgcctccccaggcggttttttcgtttacagagcaggagattacgacgatcgtaaaaggatctcaagaagatcctttacggattcccgacacca

SEQ ID NO: 5190 - DNA, 4258 bp, synthetic construct
  source 1..4258: mol_type = other DNA
tcactctagatttcagtgcaatttatctcttcaaatgtagcacctgaagtcagccccatacgatataagttgtaattctcatgttagtcatgccccgcgcccaccggaaggagctgactgggttgaaggctctcaagggcatcggtcgagatcccggtgcctaatgagtgagctaacttacattaattgcgttgcgctcactgcccgctttccagtcgggaaacctgtcgtgccagctgcattaatgaatcggccaacgcgcggggagaggcggtttgcgtattgggcgccagggtggtttttcttttcaccagtgagacgggcaacagctgattgcccttcaccgcctggccctgagagagttgcagcaagcggtccacgctggtttgccccagcaggcgaaaatcctgtttgatggtggttaacggcgggatataacatgagctgtcttcggtatcgtcgtatcccactaccgagatgtccgcaccaacgcgcagcccggactcggtaatggcgcgcattgcgcccagcgccatctgatcgttggcaaccagcatcgcagtgggaacgatgccctcattcagcatttgcatggtttgttgaaaaccggacatggcactccagtcgccttcccgttccgctatcggctgaatttgattgcgagtgagatatttatgccagccagccagacgcagacgcgccgagacagaacttaatgggcccgctaacagcgcgatttgctggtgacccaatgcgaccagatgctccacgcccagtcgcgtaccgtcttcatgggagaaaataatactgttgatgggtgtctggtcagagacatcaagaaataacgccggaacattagtgcaggcagcttccacagcaatggcatcctggtcatccagcggatagttaatgatcagcccactgacgcgttgcgcgagaagattgtgcaccgccgctttacaggcttcgacgccgcttcgttctaccatcgacaccaccacgctggcacccagttgatcggcgcgagatttaatcgccgcgacaatttgcgacggcgcgtgcagggccagactggaggtggcaacgccaatcagcaacgactgtttgcccgccagttgttgtgccacgcggttgggaatgtaattcagctccgccatcgccgcttccactttttcccgcgttttcgcagaaacgtggctggcctggttcaccacgcgggaaacggtctgataagagacaccggcatactctgcgacatcgtataacgttactggtttcacattcaccaccctgaattgactctcttccgggcgctatcatgccataccgcgaaaggttttgcgccattcgatggtgtccgggatctcgacgctctcccttatgcgactcctgcattaggaaattaatacgactcactataggggaattgtgagcggataacaattcccctgtagaaataattttgtttaactttaataaggagatataccatgagcaaaggagaagaacttttcactggagttgtcccaattcttgttgaattagatggtgatgttaatgggcacaaattttctgtccgtggagagggtgaaggtgatgctacaaacggaaaactcacccttaaatttatttgcactactggaaaactacctgttccgtggccaacacttgtcactactctgacctatggtgttcaatgcttttcccgttatccggatcacatgaaacggcatgactttttcaagagtgccatgcccgaaggttatgtacaggaacgcactatatctttcaaagatgacgggacctacaagacgcgtgctgaagtcaagtttgaaggtgatacccttgttaatcgtatcgagttaaagggtattgattttaaagaagatggaaacattcttggacacaaactcgagtacaactttaactcacacaatgtatacatcacggcagacaaacaaaagaatggaatcaaagctaacttcaaaattcgccacaacgttgaagatggttccgttcaactagcagaccattatcaacaaaatactccaattggcgatggccccgtccttttaccagacaaccattacctgtcgacacaatctgtcctttcgaaagatcccaacgaaaaggatgttggtggaggtgttgatacaaccataaaaggattattacacccattaattgataattatcacacccatggaggtagtgctggaggtggatctcgtgaccacatggtccttcttgagtttgtaactgctgctgggattacacatggctgagcaataactagcataaccccttggggcctctaaacgggtcttgaggggttttttgctgaaacctcaggcatttgagaagcacacggtcacaccactacaagggaaacatggatcagaaggaggcctgagcaataactagcataaccccttggggcctctaaacgggtcttgaggggttttttgctgaaacctcaggcatttgagaagcacacggtcacactgcttccggtagtcaataaaccggtaaaccagcaatagacataagcggctatttaacgaccctgccctgaaccgacgacaagctgacgaccgggtctccgcaagtggcacttttcggggaaatgtgcgcggaacccctatttgtttatttttctaaatacattcaaatatgtatccgctcatgaattaattcttagaaaaactcatcgagcatcaaatgaaactgcaatttattcatatcaggattatcaataccatatttttgaaaaagccgtttctgtaatgaaggagaaaactcaccgaggcagttccataggatggcaagatcctggtatcggtctgcgattccgactcgtccaacatcaatacaacctattaatttcccctcgtcaaaaataaggttatcaagtgagaaatcaccatgagtgacgactgaatccggtgagaatggcaaaagtttatgcatttctttccagacttgttcaacaggccagccattacgctcgtcatcaaaatcactcgcatcaaccaaaccgttattcattcgtgattgcgcctgagcgagacgaaatacgcggtcgctgttaaaaggacaattacaaacaggaatcgaatgcaaccggcgcaggaacactgccagcgcatcaacaatattttcacctgaatcaggatattcttctaatacctggaatgctgttttcccggggatcgcagtggtgagtaaccatgcatcatcaggagtacggataaaatgcttgatggtcggaagaggcataaattccgtcagccagtttagtctgaccatctcatctgtaacatcattggcaacgctacctttgccatgtttcagaaacaactctggcgcatcgggcttcccatacaatcgatagattgtcgcacctgattgcccgacattatcgcgagcccatttatacccatataaatcagcatccatgttggaatttaatcgcggcctagagcaagacgtttcccgttgaatatggctcatactcttcctttttcaatattattgaagcatttatcagggttattgtctcatgagcggatacatatttgaatgtatttagaaaaataaacaaataggcatgctagcgcagaaacgtcctagaagatgccaggaggatacttagcagagagacaataaggccggagcgaagccgtttttccataggctccgcccccctgacgaacatcacgaaatctgacgctcaaatcagtggtggcgaaacccgacaggactataaagataccaggcgtttccccctgatggctccctcttgcgctctcctgttcccgtcctgcggcgtccgtgttgtggtggaggctttacccaaatcaccacgtcccgttccgtgtagacagttcgctccaagctgggctgtgtgcaagaaccccccgttcagcccgactgctgcgccttatccggtaactatcatcttgagtccaacccggaaagacacgacaaaacgccactggcagcagccattggtaactgagaattagtggatttagatatcgagagtcttgaagtggtggcctaacagaggctacactgaaaggacagtatttggtatctgcgctccactaaagccagttaccaggttaagcagttccccaactgacttaaccttcgatcaaaccgcctccccaggcggttttttcgtttacagagcaggagattacgacgatcgtaaaaggatctcaagaagatcctttacggattcccgacacca

SEQ ID NO: 5191 - DNA, 4258 bp, synthetic construct
  source 1..4258: mol_type = other DNA
tcactctagatttcagtgcaatttatctcttcaaatgtagcacctgaagtcagccccatacgatataagttgtaattctcatgttagtcatgccccgcgcccaccggaaggagctgactgggttgaaggctctcaagggcatcggtcgagatcccggtgcctaatgagtgagctaacttacattaattgcgttgcgctcactgcccgctttccagtcgggaaacctgtcgtgccagctgcattaatgaatcggccaacgcgcggggagaggcggtttgcgtattgggcgccagggtggtttttcttttcaccagtgagacgggcaacagctgattgcccttcaccgcctggccctgagagagttgcagcaagcggtccacgctggtttgccccagcaggcgaaaatcctgtttgatggtggttaacggcgggatataacatgagctgtcttcggtatcgtcgtatcccactaccgagatgtccgcaccaacgcgcagcccggactcggtaatggcgcgcattgcgcccagcgccatctgatcgttggcaaccagcatcgcagtgggaacgatgccctcattcagcatttgcatggtttgttgaaaaccggacatggcactccagtcgccttcccgttccgctatcggctgaatttgattgcgagtgagatatttatgccagccagccagacgcagacgcgccgagacagaacttaatgggcccgctaacagcgcgatttgctggtgacccaatgcgaccagatgctccacgcccagtcgcgtaccgtcttcatgggagaaaataatactgttgatgggtgtctggtcagagacatcaagaaataacgccggaacattagtgcaggcagcttccacagcaatggcatcctggtcatccagcggatagttaatgatcagcccactgacgcgttgcgcgagaagattgtgcaccgccgctttacaggcttcgacgccgcttcgttctaccatcgacaccaccacgctggcacccagttgatcggcgcgagatttaatcgccgcgacaatttgcgacggcgcgtgcagggccagactggaggtggcaacgccaatcagcaacgactgtttgcccgccagttgttgtgccacgcggttgggaatgtaattcagctccgccatcgccgcttccactttttcccgcgttttcgcagaaacgtggctggcctggttcaccacgcgggaaacggtctgataagagacaccggcatactctgcgacatcgtataacgttactggtttcacattcaccaccctgaattgactctcttccgggcgctatcatgccataccgcgaaaggttttgcgccattcgatggtgtccgggatctcgacgctctcccttatgcgactcctgcattaggaaattaatacgactcactataggggaattgtgagcggataacaattcccctgtagaaataattttgtttaactttaataaggagatataccatgagcaaaggagaagaacttttcactggagttgtcccaattcttgttgaattagatggtgatgttaatgggcacaaattttctgtccgtggagagggtgaaggtgatgctacaaacggaaaactcacccttaaatttatttgcactactggaaaactacctgttccgtggccaacacttgtcactactctgacctatggtgttcaatgcttttcccgttatccggatcacatgaaacggcatgactttttcaagagtgccatgcccgaaggttatgtacaggaacgcactatatctttcaaagatgacgggacctacaagacgcgtgctgaagtcaagtttgaaggtgatacccttgttaatcgtatcgagttaaagggtattgattttaaagaagatggaaacattcttggacacaaactcgagtacaactttaactcacacaatgtatacatcacggcagacaaacaaaagaatggaatcaaagctaacttcaaaattcgccacaacgttgaagatggttccgttcaactagcagaccattatcaacaaaatactccaattggcgatggccccgtccttttaccagacaaccattacctgtcgacacaatctgtcctttcgaaagatcccaacgaaaaggatgttggtggagtgttgatacaaccatcaaatggtaattacacccataaattgataattatcacacccagtggaggtagtgctggaggtggatctcgtgaccacatggtccttcttgagtttgtaactgctgctgggattacacatggctgagcaataactagcataaccccttggggcctctaaacgggtcttgaggggttttttgctgaaacctcaggcatttgagaagcacacggtcacaccactacaagggaaacatggatcagaaggaggcctgagcaataactagcataaccccttggggcctctaaacgggtcttgaggggttttttgctgaaacctcaggcatttgagaagcacacggtcacactgcttccggtagtcaataaaccggtaaaccagcaatagacataagcggctatttaacgaccctgccctgaaccgacgacaagctgacgaccgggtctccgcaagtggcacttttcggggaaatgtgcgcggaacccctatttgtttatttttctaaatacattcaaatatgtatccgctcatgaattaattcttagaaaaactcatcgagcatcaaatgaaactgcaatttattcatatcaggattatcaataccatatttttgaaaaagccgtttctgtaatgaaggagaaaactcaccgaggcagttccataggatggcaagatcctggtatcggtctgcgattccgactcgtccaacatcaatacaacctattaatttcccctcgtcaaaaataaggttatcaagtgagaaatcaccatgagtgacgactgaatccggtgagaatggcaaaagtttatgcatttctttccagacttgttcaacaggccagccattacgctcgtcatcaaaatcactcgcatcaaccaaaccgttattcattcgtgattgcgcctgagcgagacgaaatacgcggtcgctgttaaaaggacaattacaaacaggaatcgaatgcaaccggcgcaggaacactgccagcgcatcaacaatattttcacctgaatcaggatattcttctaatacctggaatgctgttttcccggggatcgcagtggtgagtaaccatgcatcatcaggagtacggataaaatgcttgatggtcggaagaggcataaattccgtcagccagtttagtctgaccatctcatctgtaacatcattggcaacgctacctttgccatgtttcagaaacaactctggcgcatcgggcttcccatacaatcgatagattgtcgcacctgattgcccgacattatcgcgagcccatttatacccatataaatcagcatccatgttggaatttaatcgcggcctagagcaagacgtttcccgttgaatatggctcatactcttcctttttcaatattattgaagcatttatcagggttattgtctcatgagcggatacatatttgaatgtatttagaaaaataaacaaataggcatgctagcgcagaaacgtcctagaagatgccaggaggatacttagcagagagacaataaggccggagcgaagccgtttttccataggctccgcccccctgacgaacatcacgaaatctgacgctcaaatcagtggtggcgaaacccgacaggactataaagataccaggcgtttccccctgatggctccctcttgcgctctcctgttcccgtcctgcggcgtccgtgttgtggtggaggctttacccaaatcaccacgtcccgttccgtgtagacagttcgctccaagctgggctgtgtgcaagaaccccccgttcagcccgactgctgcgccttatccggtaactatcatcttgagtccaacccggaaagacacgacaaaacgccactggcagcagccattggtaactgagaattagtggatttagatatcgagagtcttgaagtggtggcctaacagaggctacactgaaaggacagtatttggtatctgcgctccactaaagccagttaccaggttaagcagttccccaactgacttaaccttcgatcaaaccgcctccccaggcggttttttcgtttacagagcaggagattacgacgatcgtaaaaggatctcaagaagatcctttacggattcccgacacca

SEQ ID NO: 5192 - DNA, 4258 bp, synthetic construct
  source 1..4258: mol_type = other DNA
tcactctagatttcagtgcaatttatctcttcaaatgtagcacctgaagtcagccccatacgatataagttgtaattctcatgttagtcatgccccgcgcccaccggaaggagctgactgggttgaaggctctcaagggcatcggtcgagatcccggtgcctaatgagtgagctaacttacattaattgcgttgcgctcactgcccgctttccagtcgggaaacctgtcgtgccagctgcattaatgaatcggccaacgcgcggggagaggcggtttgcgtattgggcgccagggtggtttttcttttcaccagtgagacgggcaacagctgattgcccttcaccgcctggccctgagagagttgcagcaagcggtccacgctggtttgccccagcaggcgaaaatcctgtttgatggtggttaacggcgggatataacatgagctgtcttcggtatcgtcgtatcccactaccgagatgtccgcaccaacgcgcagcccggactcggtaatggcgcgcattgcgcccagcgccatctgatcgttggcaaccagcatcgcagtgggaacgatgccctcattcagcatttgcatggtttgttgaaaaccggacatggcactccagtcgccttcccgttccgctatcggctgaatttgattgcgagtgagatatttatgccagccagccagacgcagacgcgccgagacagaacttaatgggcccgctaacagcgcgatttgctggtgacccaatgcgaccagatgctccacgcccagtcgcgtaccgtcttcatgggagaaaataatactgttgatgggtgtctggtcagagacatcaagaaataacgccggaacattagtgcaggcagcttccacagcaatggcatcctggtcatccagcggatagttaatgatcagcccactgacgcgttgcgcgagaagattgtgcaccgccgctttacaggcttcgacgccgcttcgttctaccatcgacaccaccacgctggcacccagttgatcggcgcgagatttaatcgccgcgacaatttgcgacggcgcgtgcagggccagactggaggtggcaacgccaatcagcaacgactgtttgcccgccagttgttgtgccacgcggttgggaatgtaattcagctccgccatcgccgcttccactttttcccgcgttttcgcagaaacgtggctggcctggttcaccacgcgggaaacggtctgataagagacaccggcatactctgcgacatcgtataacgttactggtttcacattcaccaccctgaattgactctcttccgggcgctatcatgccataccgcgaaaggttttgcgccattcgatggtgtccgggatctcgacgctctcccttatgcgactcctgcattaggaaattaatacgactcactataggggaattgtgagcggataacaattcccctgtagaaataattttgtttaactttaataaggagatataccatgagcaaaggagaagaacttttcactggagttgtcccaattcttgttgaattagatggtgatgttaatgggcacaaattttctgtccgtggagagggtgaaggtgatgctacaaacggaaaactcacccttaaatttatttgcactactggaaaactacctgttccgtggccaacacttgtcactactctgacctatggtgttcaatgcttttcccgttatccggatcacatgaaacggcatgactttttcaagagtgccatgcccgaaggttatgtacaggaacgcactatatctttcaaagatgacgggacctacaagacgcgtgctgaagtcaagtttgaaggtgatacccttgttaatcgtatcgagttaaagggtattgattttaaagaagatggaaacattcttggacacaaactcgagtacaactttaactcacacaatgtatacatcacggcagacaaacaaaagaatggaatcaaagctaacttcaaaattcgccacaacgttgaagatggttccgttcaactagcagaccattatcaacaaaatactccaattggcgatggccccgtccttttaccagacaaccattacctgtcgacacaatctgtcctttcgaaagatcccaacgaaaaggatgttggtggagtgttgatacaaccattaaatgataattccacccataatttgataattatcacacccagtggaggtagtgctggaggtggatctcgtgaccacatggtccttcttgagtttgtaactgctgctgggattacacatggctgagcaataactagcataaccccttggggcctctaaacgggtcttgaggggttttttgctgaaacctcaggcatttgagaagcacacggtcacaccactacaagggaaacatggatcagaaggaggcctgagcaataactagcataaccccttggggcctctaaacgggtcttgaggggttttttgctgaaacctcaggcatttgagaagcacacggtcacactgcttccggtagtcaataaaccggtaaaccagcaatagacataagcggctatttaacgaccctgccctgaaccgacgacaagctgacgaccgggtctccgcaagtggcacttttcggggaaatgtgcgcggaacccctatttgtttatttttctaaatacattcaaatatgtatccgctcatgaattaattcttagaaaaactcatcgagcatcaaatgaaactgcaatttattcatatcaggattatcaataccatatttttgaaaaagccgtttctgtaatgaaggagaaaactcaccgaggcagttccataggatggcaagatcctggtatcggtctgcgattccgactcgtccaacatcaatacaacctattaatttcccctcgtcaaaaataaggttatcaagtgagaaatcaccatgagtgacgactgaatccggtgagaatggcaaaagtttatgcatttctttccagacttgttcaacaggccagccattacgctcgtcatcaaaatcactcgcatcaaccaaaccgttattcattcgtgattgcgcctgagcgagacgaaatacgcggtcgctgttaaaaggacaattacaaacaggaatcgaatgcaaccggcgcaggaacactgccagcgcatcaacaatattttcacctgaatcaggatattcttctaatacctggaatgctgttttcccggggatcgcagtggtgagtaaccatgcatcatcaggagtacggataaaatgcttgatggtcggaagaggcataaattccgtcagccagtttagtctgaccatctcatctgtaacatcattggcaacgctacctttgccatgtttcagaaacaactctggcgcatcgggcttcccatacaatcgatagattgtcgcacctgattgcccgacattatcgcgagcccatttatacccatataaatcagcatccatgttggaatttaatcgcggcctagagcaagacgtttcccgttgaatatggctcatactcttcctttttcaatattattgaagcatttatcagggttattgtctcatgagcggatacatatttgaatgtatttagaaaaataaacaaataggcatgctagcgcagaaacgtcctagaagatgccaggaggatacttagcagagagacaataaggccggagcgaagccgtttttccataggctccgcccccctgacgaacatcacgaaatctgacgctcaaatcagtggtggcgaaacccgacaggactataaagataccaggcgtttccccctgatggctccctcttgcgctctcctgttcccgtcctgcggcgtccgtgttgtggtggaggctttacccaaatcaccacgtcccgttccgtgtagacagttcgctccaagctgggctgtgtgcaagaaccccccgttcagcccgactgctgcgccttatccggtaactatcatcttgagtccaacccggaaagacacgacaaaacgccactggcagcagccattggtaactgagaattagtggatttagatatcgagagtcttgaagtggtggcctaacagaggctacactgaaaggacagtatttggtatctgcgctccactaaagccagttaccaggttaagcagttccccaactgacttaaccttcgatcaaaccgcctccccaggcggttttttcgtttacagagcaggagattacgacgatcgtaaaaggatctcaagaagatcctttacggattcccgacacca

SEQ ID NO: 5193 - DNA, 4258 bp, synthetic construct
  source 1..4258: mol_type = other DNA
atgtagcacctgaagtcagccccatacgatataagttgtaattctcatgttagtcatgccccgcgcccaccggaaggagctgactgggttgaaggctctcaagggcatcggtcgagatcccggtgcctaatgagtgagctaacttacattaattgcgttgcgctcactgcccgctttccagtcgggaaacctgtcgtgccagctgcattaatgaatcggccaacgcgcggggagaggcggtttgcgtattgggcgccagggtggtttttcttttcaccagtgagacgggcaacagctgattgcccttcaccgcctggccctgagagagttgcagcaagcggtccacgctggtttgccccagcaggcgaaaatcctgtttgatggtggttaacggcgggatataacatgagctgtcttcggtatcgtcgtatcccactaccgagatgtccgcaccaacgcgcagcccggactcggtaatggcgcgcattgcgcccagcgccatctgatcgttggcaaccagcatcgcagtgggaacgatgccctcattcagcatttgcatggtttgttgaaaaccggacatggcactccagtcgccttcccgttccgctatcggctgaatttgattgcgagtgagatatttatgccagccagccagacgcagacgcgccgagacagaacttaatgggcccgctaacagcgcgatttgctggtgacccaatgcgaccagatgctccacgcccagtcgcgtaccgtcttcatgggagaaaataatactgttgatgggtgtctggtcagagacatcaagaaataacgccggaacattagtgcaggcagcttccacagcaatggcatcctggtcatccagcggatagttaatgatcagcccactgacgcgttgcgcgagaagattgtgcaccgccgctttacaggcttcgacgccgcttcgttctaccatcgacaccaccacgctggcacccagttgatcggcgcgagatttaatcgccgcgacaatttgcgacggcgcgtgcagggccagactggaggtggcaacgccaatcagcaacgactgtttgcccgccagttgttgtgccacgcggttgggaatgtaattcagctccgccatcgccgcttccactttttcccgcgttttcgcagaaacgtggctggcctggttcaccacgcgggaaacggtctgataagagacaccggcatactctgcgacatcgtataacgttactggtttcacattcaccaccctgaattgactctcttccgggcgctatcatgccataccgcgaaaggttttgcgccattcgatggtgtccgggatctcgacgctctcccttatgcgactcctgcattaggaaattaatacgactcactataggggaattgtgagcggataacaattcccctgtagaaataattttgtttaactttaataaggagatataccatgagcaaaggagaagaacttttcactggagttgtcccaattcttgttgaattagatggtgatgttaatgggcacaaattttctgtccgtggagagggtgaaggtgatgctacaaacggaaaactcacccttaaatttatttgcactactggaaaactacctgttccgtggccaacacttgtcactactctgacctatggtgttcaatgcttttcccgttatccggatcacatgaaacggcatgactttttcaagagtgccatgcccgaaggttatgtacaggaacgcactatatctttcaaagatgacgggacctacaagacgcgtgctgaagtcaagtttgaaggtgatacccttgttaatcgtatcgagttaaagggtattgattttaaagaagatggaaacattcttggacacaaactcgagtacaactttaactcacacaatgtatacatcacggcagacaaacaaaagaatggaatcaaagctaacttcaaaattcgccacaacgttgaagatggttccgttcaactagcagaccattatcaacaaaatactccaattggcgatggccccgtccttttaccagacaaccattacctgtcgacacaatctgtcctttcgaaagatcccaacgaaaaggatgttggtggagtgttgatacaaccattaaatggtaattccacccaaatattgataattatcacacccagtggaggtagtgctggaggtggatctcgtgaccacatggtccttcttgagtttgtaactgctgctgggattacacatggctgagcaataactagcataaccccttggggcctctaaacgggtcttgaggggttttttgctgaaacctcaggcatttgagaagcacacggtcacaccactacaagggaaacatggatcagaaggaggcctgagcaataactagcataaccccttggggcctctaaacgggtcttgaggggttttttgctgaaacctcaggcatttgagaagcacacggtcacactgcttccggtagtcaataaaccggtaaaccagcaatagacataagcggctatttaacgaccctgccctgaaccgacgacaagctgacgaccgggtctccgcaagtggcacttttcggggaaatgtgcgcggaacccctatttgtttatttttctaaatacattcaaatatgtatccgctcatgaattaattcttagaaaaactcatcgagcatcaaatgaaactgcaatttattcatatcaggattatcaataccatatttttgaaaaagccgtttctgtaatgaaggagaaaactcaccgaggcagttccataggatggcaagatcctggtatcggtctgcgattccgactcgtccaacatcaatacaacctattaatttcccctcgtcaaaaataaggttatcaagtgagaaatcaccatgagtgacgactgaatccggtgagaatggcaaaagtttatgcatttctttccagacttgttcaacaggccagccattacgctcgtcatcaaaatcactcgcatcaaccaaaccgttattcattcgtgattgcgcctgagcgagacgaaatacgcggtcgctgttaaaaggacaattacaaacaggaatcgaatgcaaccggcgcaggaacactgccagcgcatcaacaatattttcacctgaatcaggatattcttctaatacctggaatgctgttttcccggggatcgcagtggtgagtaaccatgcatcatcaggagtacggataaaatgcttgatggtcggaagaggcataaattccgtcagccagtttagtctgaccatctcatctgtaacatcattggcaacgctacctttgccatgtttcagaaacaactctggcgcatcgggcttcccatacaatcgatagattgtcgcacctgattgcccgacattatcgcgagcccatttatacccatataaatcagcatccatgttggaatttaatcgcggcctagagcaagacgtttcccgttgaatatggctcatactcttcctttttcaatattattgaagcatttatcagggttattgtctcatgagcggatacatatttgaatgtatttagaaaaataaacaaataggcatgctagcgcagaaacgtcctagaagatgccaggaggatacttagcagagagacaataaggccggagcgaagccgtttttccataggctccgcccccctgacgaacatcacgaaatctgacgctcaaatcagtggtggcgaaacccgacaggactataaagataccaggcgtttccccctgatggctccctcttgcgctctcctgttcccgtcctgcggcgtccgtgttgtggtggaggctttacccaaatcaccacgtcccgttccgtgtagacagttcgctccaagctgggctgtgtgcaagaaccccccgttcagcccgactgctgcgccttatccggtaactatcatcttgagtccaacccggaaagacacgacaaaacgccactggcagcagccattggtaactgagaattagtggatttagatatcgagagtcttgaagtggtggcctaacagaggctacactgaaaggacagtatttggtatctgcgctccactaaagccagttaccaggttaagcagttccccaactgacttaaccttcgatcaaaccgcctccccaggcggttttttcgtttacagagcaggagattacgacgatcgtaaaaggatctcaagaagatcctttacggattcccgacaccatcactctagatttcagtgcaatttatctcttcaa

SEQ ID NO: 5194 - DNA, 4258 bp, synthetic construct
  source 1..4258: mol_type = other DNA
tcactctagatttcagtgcaatttatctcttcaaatgtagcacctgaagtcagccccatacgatataagttgtaattctcatgttagtcatgccccgcgcccaccggaaggagctgactgggttgaaggctctcaagggcatcggtcgagatcccggtgcctaatgagtgagctaacttacattaattgcgttgcgctcactgcccgctttccagtcgggaaacctgtcgtgccagctgcattaatgaatcggccaacgcgcggggagaggcggtttgcgtattgggcgccagggtggtttttcttttcaccagtgagacgggcaacagctgattgcccttcaccgcctggccctgagagagttgcagcaagcggtccacgctggtttgccccagcaggcgaaaatcctgtttgatggtggttaacggcgggatataacatgagctgtcttcggtatcgtcgtatcccactaccgagatgtccgcaccaacgcgcagcccggactcggtaatggcgcgcattgcgcccagcgccatctgatcgttggcaaccagcatcgcagtgggaacgatgccctcattcagcatttgcatggtttgttgaaaaccggacatggcactccagtcgccttcccgttccgctatcggctgaatttgattgcgagtgagatatttatgccagccagccagacgcagacgcgccgagacagaacttaatgggcccgctaacagcgcgatttgctggtgacccaatgcgaccagatgctccacgcccagtcgcgtaccgtcttcatgggagaaaataatactgttgatgggtgtctggtcagagacatcaagaaataacgccggaacattagtgcaggcagcttccacagcaatggcatcctggtcatccagcggatagttaatgatcagcccactgacgcgttgcgcgagaagattgtgcaccgccgctttacaggcttcgacgccgcttcgttctaccatcgacaccaccacgctggcacccagttgatcggcgcgagatttaatcgccgcgacaatttgcgacggcgcgtgcagggccagactggaggtggcaacgccaatcagcaacgactgtttgcccgccagttgttgtgccacgcggttgggaatgtaattcagctccgccatcgccgcttccactttttcccgcgttttcgcagaaacgtggctggcctggttcaccacgcgggaaacggtctgataagagacaccggcatactctgcgacatcgtataacgttactggtttcacattcaccaccctgaattgactctcttccgggcgctatcatgccataccgcgaaaggttttgcgccattcgatggtgtccgggatctcgacgctctcccttatgcgactcctgcattaggaaattaatacgactcactataggggaattgtgagcggataacaattcccctgtagaaataattttgtttaactttaataaggagatataccatgagcaaaggagaagaacttttcactggagttgtcccaattcttgttgaattagatggtgatgttaatgggcacaaattttctgtccgtggagagggtgaaggtgatgctacaaacggaaaactcacccttaaatttatttgcactactggaaaactacctgttccgtggccaacacttgtcactactctgacctatggtgttcaatgcttttcccgttatccggatcacatgaaacggcatgactttttcaagagtgccatgcccgaaggttatgtacaggaacgcactatatctttcaaagatgacgggacctacaagacgcgtgctgaagtcaagtttgaaggtgatacccttgttaatcgtatcgagttaaagggtattgattttaaagaagatggaaacattcttggacacaaactcgagtacaactttaactcacacaatgtatacatcacggcagacaaacaaaagaatggaatcaaagctaacttcaaaattcgccacaacgttgaagatggttccgttcaactagcagaccattatcaacaaaatactccaattggcgatggccccgtccttttaccagacaaccattacctgtcgacacaatctgtcctttcgaaagatcccaacgaaaaggatgttggtggagtgttgataccaccatcaaatggtaattccacccctacattgataattatcacacccagtggaggtagtgctggaggtggatctcgtgaccacatggtccttcttgagtttgtaactgctgctgggattacacatggctgagcaataactagcataaccccttggggcctctaaacgggtcttgaggggttttttgctgaaacctcaggcatttgagaagcacacggtcacaccactacaagggaaacatggatcagaaggaggcctgagcaataactagcataaccccttggggcctctaaacgggtcttgaggggttttttgctgaaacctcaggcatttgagaagcacacggtcacactgcttccggtagtcaataaaccggtaaaccagcaatagacataagcggctatttaacgaccctgccctgaaccgacgacaagctgacgaccgggtctccgcaagtggcacttttcggggaaatgtgcgcggaacccctatttgtttatttttctaaatacattcaaatatgtatccgctcatgaattaattcttagaaaaactcatcgagcatcaaatgaaactgcaatttattcatatcaggattatcaataccatatttttgaaaaagccgtttctgtaatgaaggagaaaactcaccgaggcagttccataggatggcaagatcctggtatcggtctgcgattccgactcgtccaacatcaatacaacctattaatttcccctcgtcaaaaataaggttatcaagtgagaaatcaccatgagtgacgactgaatccggtgagaatggcaaaagtttatgcatttctttccagacttgttcaacaggccagccattacgctcgtcatcaaaatcactcgcatcaaccaaaccgttattcattcgtgattgcgcctgagcgagacgaaatacgcggtcgctgttaaaaggacaattacaaacaggaatcgaatgcaaccggcgcaggaacactgccagcgcatcaacaatattttcacctgaatcaggatattcttctaatacctggaatgctgttttcccggggatcgcagtggtgagtaaccatgcatcatcaggagtacggataaaatgcttgatggtcggaagaggcataaattccgtcagccagtttagtctgaccatctcatctgtaacatcattggcaacgctacctttgccatgtttcagaaacaactctggcgcatcgggcttcccatacaatcgatagattgtcgcacctgattgcccgacattatcgcgagcccatttatacccatataaatcagcatccatgttggaatttaatcgcggcctagagcaagacgtttcccgttgaatatggctcatactcttcctttttcaatattattgaagcatttatcagggttattgtctcatgagcggatacatatttgaatgtatttagaaaaataaacaaataggcatgctagcgcagaaacgtcctagaagatgccaggaggatacttagcagagagacaataaggccggagcgaagccgtttttccataggctccgcccccctgacgaacatcacgaaatctgacgctcaaatcagtggtggcgaaacccgacaggactataaagataccaggcgtttccccctgatggctccctcttgcgctctcctgttcccgtcctgcggcgtccgtgttgtggtggaggctttacccaaatcaccacgtcccgttccgtgtagacagttcgctccaagctgggctgtgtgcaagaaccccccgttcagcccgactgctgcgccttatccggtaactatcatcttgagtccaacccggaaagacacgacaaaacgccactggcagcagccattggtaactgagaattagtggatttagatatcgagagtcttgaagtggtggcctaacagaggctacactgaaaggacagtatttggtatctgcgctccactaaagccagttaccaggttaagcagttccccaactgacttaaccttcgatcaaaccgcctccccaggcggttttttcgtttacagagcaggagattacgacgatcgtaaaaggatctcaagaagatcctttacggattcccgacacca

SEQ ID NO: 5195 - DNA, 4034 bp, synthetic construct
  source 1..4034: mol_type = other DNA
cgggatctcgacgctctcccttatgcgactcctgcattaggaaattaatacgactcactataggggaattgtgagcggataacaattcccctgtagaaataattttgtttaactttaataaggagatataccatgagcaaaggagaagaacttttcactggagttgtcccaattcttgttgaattagatggtgatgttaatgggcacaaattttctgtccgtggagagggtgaaggtgatgctacaaacggaaaactcacccttaaatttatttgcactactggaaaactacctgttccgtggccaacacttgtcactactctgacctatggtgttcaatgcttttcccgttatccggatcacatgaaacggcatgactttttcaagagtgccatgcccgaaggttatgtacaggaacgcactatatctttcaaagatgacgggacctacaagacgcgtgctgaagtcaagtttgaaggtgatacccttgttaatcgtatcgagttaaagggtattgattttaaagaagatggaaacattcttggacacaaactcgagtacaactttaactcacacaatgtatacatcacggcagacaaacaaaagaatggaatcaaagctaacttcaaaattcgccacaacgttgaagatggttccgttcaactagcagaccattatcaacaaaatactccaattggcgatggccctgtccttttaccagacaaccattacctgtcgacacaatctgtcctttcgaaagatcccaacgaaaagcgtgaccacatggtccttcttgagtttgtaactgctgctgggattacacatggctgagcaataactagcataaccccttggggcctctaaacgggtcttgaggggttttttgctgaaacctcaggcatttgagaagcacacggtcacactgcttccggtagtcaataaaccggtaaaccagcaatagacataagcggctatttaacgaccctgccctgaaccgacgacaagctgacgaccgggtctccgcaagtggcacttttcggggaaatgtgcgcggaacccctatttgtttatttttctaaatacattcaaatatgtatccgctcatgaattaattcttagaaaaactcatcgagcatcaaatgaaactgcaatttattcatatcaggattatcaataccatatttttgaaaaagccgtttctgtaatgaaggagaaaactcaccgaggcagttccataggatggcaagatcctggtatcggtctgcgattccgactcgtccaacatcaatacaacctattaatttcccctcgtcaaaaataaggttatcaagtgagaaatcaccatgagtgacgactgaatccggtgagaatggcaaaagtttatgcatttctttccagacttgttcaacaggccagccattacgctcgtcatcaaaatcactcgcatcaaccaaaccgttattcattcgtgattgcgcctgagcgagacgaaatacgcggtcgctgttaaaaggacaattacaaacaggaatcgaatgcaaccggcgcaggaacactgccagcgcatcaacaatattttcacctgaatcaggatattcttctaatacctggaatgctgttttcccggggatcgcagtggtgagtaaccatgcatcatcaggagtacggataaaatgcttgatggtcggaagaggcataaattccgtcagccagtttagtctgaccatctcatctgtaacatcattggcaacgctacctttgccatgtttcagaaacaactctggcgcatcgggcttcccatacaatcgatagattgtcgcacctgattgcccgacattatcgcgagcccatttatacccatataaatcagcatccatgttggaatttaatcgcggcctagagcaagacgtttcccgttgaatatggctcatactcttcctttttcaatattattgaagcatttatcagggttattgtctcatgagcggatacatatttgaatgtatttagaaaaataaacaaataggcatgctagcgcagaaacgtcctagaagatgccaggaggatacttagcagagagacaataaggccggagcgaagccgtttttccataggctccgcccccctgacgaacatcacgaaatctgacgctcaaatcagtggtggcgaaacccgacaggactataaagataccaggcgtttccccctgatggctccctcttgcgctctcctgttcccgtcctgcggcgtccgtgttgtggtggaggctttacccaaatcaccacgtcccgttccgtgtagacagttcgctccaagctgggctgtgtgcaagaaccccccgttcagcccgactgctgcgccttatccggtaactatcatcttgagtccaacccggaaagacacgacaaaacgccactggcagcagccattggtaactgagaattagtggatttagatatcgagagtcttgaagtggtggcctaacagaggctacactgaaaggacagtatttggtatctgcgctccactaaagccagttaccaggttaagcagttccccaactgacttaaccttcgatcaaaccgcctccccaggcggttttttcgtttacagagcaggagattacgacgatcgtaaaaggatctcaagaagatcctttacggattcccgacaccatcactctagatttcagtgcaatttatctcttcaaatgtagcacctgaagtcagccccatacgatataagttgtaattctcatgttagtcatgccccgcgcccaccggaaggagctgactgggttgaaggctctcaagggcatcggtcgagatcccggtgcctaatgagtgagctaacttacattaattgcgttgcgctcactgcccgctttccagtcgggaaacctgtcgtgccagctgcattaatgaatcggccaacgcgcggggagaggcggtttgcgtattgggcgccagggtggtttttcttttcaccagtgagacgggcaacagctgattgcccttcaccgcctggccctgagagagttgcagcaagcggtccacgctggtttgccccagcaggcgaaaatcctgtttgatggtggttaacggcgggatataacatgagctgtcttcggtatcgtcgtatcccactaccgagatgtccgcaccaacgcgcagcccggactcggtaatggcgcgcattgcgcccagcgccatctgatcgttggcaaccagcatcgcagtgggaacgatgccctcattcagcatttgcatggtttgttgaaaaccggacatggcactccagtcgccttcccgttccgctatcggctgaatttgattgcgagtgagatatttatgccagccagccagacgcagacgcgccgagacagaacttaatgggcccgctaacagcgcgatttgctggtgacccaatgcgaccagatgctccacgcccagtcgcgtaccgtcttcatgggagaaaataatactgttgatgggtgtctggtcagagacatcaagaaataacgccggaacattagtgcaggcagcttccacagcaatggcatcctggtcatccagcggatagttaatgatcagcccactgacgcgttgcgcgagaagattgtgcaccgccgctttacaggcttcgacgccgcttcgttctaccatcgacaccaccacgctggcacccagttgatcggcgcgagatttaatcgccgcgacaatttgcgacggcgcgtgcagggccagactggaggtggcaacgccaatcagcaacgactgtttgcccgccagttgttgtgccacgcggttgggaatgtaattcagctccgccatcgccgcttccactttttcccgcgttttcgcagaaacgtggctggcctggttcaccacgcgggaaacggtctgataagagacaccggcatactctgcgacatcgtataacgttactggtttcacattcaccaccctgaattgactctcttccgggcgctatcatgccataccgcgaaaggttttgcgccattcgatggtgtc

SEQ ID NO: 5196 - DNA, 11812 bp, synthetic construct
  source 1..11812: mol_type = other DNA
attcaccaccctgaattgactctcttccgggcgctatcatgccataccgcgaaaggttttgcgccattcgatggtgtccgggatctcgacgctctcccttatgcgactcctgcattaggaaattaatacgactcactataggggaattgtgagcggataacaattcccctgtagaaataattttgtttaactttaataaggagatataccatgggtgaactgccgagtaggtagctgataacgagacctctgtcttgtcagctagggtggtctcgtgaactgccgagtaggtagctgataacggatccgaattcgagcgaaggagatatacatatgtttttgcaaagacctaaaccttacagcgatgaaagtttagaaagtttctttatccgagtggctaacaaaaatggctacggtgatgtccatcgcttcctagaagccactaaacgattccttcaagacattgaccataatggctatcaaacctttccgactgatataactcggataaacccatactcagctaaaaacagttccagcgcacgaactgcgtcattcctgaaacttgcacaattgacatttaatgaaccgccagagctacttgggttggcaattaacagaacaaacatgaaatactcgccgtcaactagcgcggttgttagaggtgcagaagtctttcctcgcagtttactacggacgcactccatcccctgctgtcctttgtgtctgcgagaaaatggctacgcctcctacctttggcactttcaggggtacgaatactgccacagccataacgtacctttaattaccacttgtagctgtggtaaggagtttgactaccgagtatctgggttaaagggcatttgctgcaaatgcaaggagcctatcaccttaaccagcagggagaacggtcatgaggcagcgtgtactgtttcaaactggcttgctggccatgaatctaaacctctgccaaatcttcctaaaagctaccgatggggtttagttcattggtggatgggtattaaagatagcgagttcgatcacttttcgttcgttcaatttttctcaaactggccaaggtcattccactcgataatcgaagatgaagtagagttcaaccttgagcatgctgttgtcagcacgtctgaattacgactaaaagatcttcttggtcgattgtttttcggttcaattcggttacctgagcggaatcttcaacacaatatcatccttggtgagcttctctgctatttagaaaatcgtttatggcaagacaagggattaatcgccaacctcaaaatgaacgcgttagaggcgactgtaatgttaaattgtagcctcgatcagattgcatcaatggttgaacaacgcatcttgaagccaaatcgaaaaagcaagcccaacagccctcttgatgttaccgattatctatttcatttcggcgatattttctgtctttggttagctgagttccaaagcgatgagtttaaccgttcgttttatgtgtcgaggtggtaaatgcaaactctgaaagaactaatcgcatccaatcctgacgacttaacaactgaacttaagagagcatttcgtccactcacaccgcatattgcaattgatggtaatgaacttgacgcactgacgatattagtcaatttaaccgataagactgatgatcagaaagacctgctcgatcgagccaaatgcaagcaaaaacttcgagatgaaaaatggtgggctagctgcataaattgcgttaattacagacaaagccataacccaaaattcccggatatacgttctgaaggcgtgattcgaacccaagccctgggtgaattaccgagtttcctactctcgtcctcaaaaatcccaccataccattggtcatatagccatgattcaaaatacgtcaacaaaagcgcattcctcaccaatgagttttgttgggatggtgagatctcatgtttgggtgagcttcttaaagatgcagatcacccactttggaatactttgaaaaagttaggttgttctcaaaaaacttgcaaagcaatggcaaaacaactagctgatattactctcacgactatcaatgtcacactcgcaccaaattacctgactcaaatatctctccccgatagtgatacatcctacatttcactctctcctgttgcatcgctatcgatgcaaagccactttcatcagaggctccaagatgaaaatcggcatagcgcgataacgcggtttagccgaactaccaacatgggggtcactgcgatgacatgtggcggcgcatttagaatgttaaagtctggcgctaagttttccagcccccctcatcaccgattaaacagtaaacgaagttggttgacgtcagagcatgttcagtcattaaaacagtaccagcgcctcaacaaaagcctcatacctgaaaactctcggattgcactccgtagaaaatacaaaatcgagcttcaaaatatggtcagatcttggtttgcaatgcaagaccatacccttgattcgaacatacttatccaacatttgaatcatgacctatcttacttaggagccacaaaacgttttgcatacgatccagcgatgaccaagctctttactgagcttttgaaacgagagttatcaaattcaatcaataatggtgagcaacacactaatggatcgtttttagtcctaccgaatatcagggtttgtggcgcaacagctttaagctccccggtaacggtggggattccatcacttacagctttctttggcttcgttcacgcatttgaacggaatataaatcgcaccacctcatcgtttcgtgttgaatcctttgcgatatgcgtccatcaactacatgtcgagaagcgaggtttgacagcagagtttgtggaaaaaggcgacgggactatatccgctcccgcgacccgggatgactggcagtgtgatgtcgtatttagccttattttgaacaccaactttgctcaacatattgaccaagatacgttagttacatcactaccaaagcgattggctcggggttcagcaaaaattgcgattgatgactttaaacatatcaactcattctcgacattagaaacagcgatcgaatctctgccaatagaagctggtaggtggttatcactttacgcacagtcaaacaataatctaagtgatctattagcagccatgacagaggaccatcagctcatggcaagctgcgtcggttaccacttgttagaagagcccaaagataaaccaaactccctcagaggttacaaacacgctatcgccgagtgcatcattggactcattaactcaatcacctttagctcagagactgatcccaacacaatcttttggtcgctaaagaactatcaaaactacctagtggtacagccaaggagtatcaacgatgaaactaccgacaaatctagcctatgagcgctctatcgacccatcagatgtctgtttttttgtcgtctggcccgatgatagaaaaacacctttaacctacaattctcgtactctgctcgggcaaatggaagcggcatcattagcctatgatgtctcaggtcaaccaataaaaagtgccaccgctgaggcgttagctcaagggaaccctcatcaagttgatttctgccacgttccatacggtgcgagtcatattgaatgcagtttctccgtctcgttttcttctgaactacgtcaaccatataagtgtaactcaagcaaagttaaacaaacgctagtgcaattagtcgagctctacgaaacgaaaatcggctggactgagctagcaacccgatatttgatgaacatttgcaacggtaaatggctgtggaaaaatacccgtaaagcctattgctggaacattgtacttacaccttggccttggaacggggaaaaggttggatttgaagatattcgtactaactacacctcacggcaagactttaaaaataataaaaattggtctgctatagttgaaatgatcaaaaccgcattttctagtactgatgggctggcgatatttgaagtcagggccaccttgcacttgccaacgaatgctatggtgcggccaagccaagttttcacagaaaaagaaagtggcagtaaaagtaaatctaaaactcaaaacagtcgagtttttcagagtacaactattgatggtgaacgatcgccaatactaggggcctttaaaacgggagcagctattgcaaccattgacgactggtatcctgaagccactgagccactaagggtcggacggtttggggttcatcgcgaagatgtcacttgctaccgtcatccgtctaccggaaaagattttttctcgatattacaacaagcagagcactatattgaagtgttgagcgccaacaaaactcccgctcaagaaactatcaacgacatgcactttttaatggctaacctgattaagggtgggatgttccagcataaaggagactgactgtgaaatggtattataagacaatcacctttctgccagagttgtgcaacaacgagtcactggctgcaaagtgtctccgcgttctgcatggatttaactatcagtatgagacacgaaatatcggcgtttcatttccgctttggtgtgatgcaacggttggaaaaaagatttcatttgtcagcaagaacaagatagaactcgacttactacttaaacaacactatttcgtccaaatggaacaacttcaatactttcatatatccaacactgttctcgtcccagaagattgtacatacgtttcctttagacgctgtcaatctatagataagctcacagcagcagggctggcaaggaaaatcagacgcctggagaaacgtgctctatctagaggcgagcaatttgacccatcatcttttgctcaaaaagagcatactgcaatagcgcactaccactcacttggggagtccagcaaacagacgaaccgcaactttcgactcaatatcaggatgctctcggagcaaccccgtgaggggaactcgatttttagtagctatggcttatcaaattcagaaaactcgtttcagcctgtacccttaatctgacctttaataaggagatataccatggcgacaagtttacctacgccctcagcaattacgacttcggcgttagagtatgcattccatactcccgctcgcaatctaacgaaatctcgcggaaaaaacattcatcgttatgtcagtgtaaagatgagtaagaggattacggtagaatctactctagagtgtgatgcctgctatcactttgattttgagccaagtattgttcgcttttgcgctcaaccgattcgatttttatattatctcaatggtcagtctcactcctatgttcctgactttctagttcaatttgataccaacgagtttgttctatatgaagtaaagtcagcttatgctaagaacaaacctgattttgatgttgaatgggaggcgaaagtaaaagcagcaactgaactagggctagaattggagcttgttgaagagagtgatattagggatacggttgtattaaataatcttaagcgcatgcatcgttatgcttcgaaagatgagctgaataacgtacataactctctcttaaaaataataaagtacaatggcgcccaatctgcaagatgcttgggagaacagttgggtttaaaaggccgaactgttttaccaattttgtgcgatttgctgtcaaggtgtttactcgatacacgtttggataagcctctatctcttgaatctcgatttgagttggccagttatggctaagaaagggttctcaagtttccatagaaaagcagtctcttcccaagatacgcttgaatcgatagagcttgtctctagcgctaattgtctagaaagtgttacgtatcaagatatatcagcatttcccgaaacaattgcggtagagattaatttccgattaagcattcttcgctttttagcgcgaaagtgcgaaaccattgtggccaaatcaattgaaccacatcgtgtagagctacagcaaaactatagtagaaaaatacccagtgcaataacgatatatcgatggtggcttgcttttcgaaaatcagactacaaccccattagcttagcacctaatatcaaggatagaggtaatagagagacaaaagtgtcaacagttgttgattctattatggaacaggcagttgaaagagttatatctggacgaaaagtcaatgttagctctgcatataaacgtgttcgacgaaaagttcgtcaatacaatctaactcatggaacgaaatacacgtatcctaagtacgaatctgtaagaaagcgagtaaaaaagaaaaccccatttgagttattagccgcagggaaaggggagagagtagctaagagagagtttcgccgaatgggaaaaaagatcctcacgtctagcgtgctagagagggttgaaatagatcacactgtcgttgacctttttgcagtacacgaagagtatcgaatcccattgggccgaccttggcttactcaattggttgattgttacagtaaagctgtaatcggtttttatttaggtttcgagcctcctagctatgtgtcggtttcccttgcacttaagaatgcaatacaacgcaaagatgacttaatctcctcgtatgaatcgatcgagaatgaatggctatgttatggcatcccagacctactcgtaactgataatggtaaagagtttttgtcgaaagcatttgatcaagcatgtgaatcactattgatcaatgtgcatcaaaataaagttgagacgcccgacaacaaacctcatgttgaacgtaactacgggactattaatacttctctgttagacgatttacctgggaaatccttcagccagtaccttcaaagagaagggtacgactctgtgggagaagctacccttacactcaatgagattagagaaatttacttaatttggttggtggatatttatcataaaaaacccaatcagagaggcactaattgtcctaatgttgcgtggaaaaagggttgtcaagaatgggaaccagaggagttctctggttctaaagacgaattagactttaaatttgctattgttgattacaaacaacttactaaagtagggataactgtctacaaagaactgagttatagcaatgaccgtttagctgaatatagagggaagaaaggaaaccataaagttcagttcaagtataaccctgagtgtatggcagttatttgggtgttggatgaggatatgaatgagtactttacagttaatgcgattgactacgaatatgcaagtagagtatcactttggcaacataaatataacatgaaatatcaagcagaactaaattcagcagaatatgatgaggacaaggaaattgatgcagaaataaaaattgaagaaatcgcagatcgttcaattgttaagactaacaaaatcagagctcggaggcgtggcgctaggcatcaagagaatagcgcaagggctaagtcaatcagtaatgcgaacccggcctcgatacaaaaacatgaagatgaaatcgttagtgcagataatgacgattgggatattgattatgtctgagaaatcgtcaaatgagtgaaacgcgtgaggctcgtatatcaagagctaaaagggcatttgtatccacaccgagcgttaggaaaatcttgagttacatggatagatgtagagatctatcagacctagagtctgagcctacatgcatgatggtctatggtgcttcgggtgtaggtaaaacgaccgtcatcaagaaatacttaaatcaaaacagaagagagtccgaagccgggggcgatataataccggttttgcatattgagttgccagacaatgcgaagccagtagatgcagcaagggaattgctggttgaaatgggtgacccgctagcactttatgaaactgacttagctagattgacgaaaagactgactgaattaatccctgcggtcggcgtgaagctgattattatcgatgagttccaacatttggtggaagaaaggtcaaatcgggttcttacccaagtaggtaattggctaaaaatgatacttaacaaaacgaaatgtccaattgttatatttggtatgccatactcaaaagttgtactgcaagcaaactcgcaacttcacgggcgattttccattcaggttgaactgcgcccctttagctaccagggaggtagaggtgtatttaaaacttttttggaataccttgataaagccctaccttttgaaaaacaggctggcttagccaacgaaagtttgcagaaaaaattgtatgcattctctcagggaaacatgcgttcgttgagaaaccttatttatcaagcatctatcgaagcaattgataatcagcatgagacgataaccgaagaagatttcgtttttgcatcgaagttgacatcgggcgataaacccaactcatggaaaaatccttttgaggagggtgttgaggtaacagaagatatgttacgaccgccaccaaaagatattggttgggaggactatttgagacattcaaccccgagagtgagtaaaccaggtagaaataaaaactttttcgaataacctaggctgctgcgctgctgccaccgctgagcaataactagcataaccccttggggcctctaaacgggtcttgaggggttttttgctgaaacctcaggcatttgagaagcacacggtcacactgcttccggtagtcaataaaccggtaaaccagcaatagacataagcggctatttaacgaccctgccctgaaccgacgaccgggtcatcgtggccggatcttgcggcccctcggcttgaacgaattgttagacattatttgccgactaccttggtgatctcgcctttcacgtagtggacaaattcttccaactgatctgcgcgcgaggccaagcgatcttcttcttgtccaagataagcctgtctagcttcaagtatgacgggctgatactgggccggcaggcgctccattgcccagtcggcagcgacatccttcggcgcgattttgccggttactgcgctgtaccaaatgcgggacaacgtaagcactacatttcgctcatcgccagcccagtcgggcggcgagttccatagcgttaaggtttcatttagcgcctcaaatagatcctgttcaggaaccggatcaaagagttcctccgccgctggacctaccaaggcaacgctatgttctcttgcttttgtcagcaagatagccagatcaatgtcgatcgtggctggctcgaagatacctgcaagaatgtcattgcgctgccattctccaaattgcagttcgcgcttagctggataacgccacggaatgatgtcgtcgtgcacaacaatggtgacttctacagcgcggagaatctcgctctctccaggggaagccgaagtttccaaaaggtcgttgatcaaagctcgccgcgttgtttcatcaagccttacggtcaccgtaaccagcaaatcaatatcactgtgtggcttcaggccgccatccactgcggagccgtacaaatgtacggccagcaacgtcggttcgagatggcgctcgatgacgccaactacctctgatagttgagtcgatacttcggcgatcaccgcttccctcatactcttcctttttcaatattattgaagcatttatcagggttattgtctcatgagcggatacatatttgaatgtatttagaaaaataaacaaatagctagctcactcggtcgctacgctccgggcgtgagactgcggcgggcgctgcggacacatacaaagttacccacagattccgtggataagcaggggactaacatgtgaggcaaaacagcagggccgcgccggtggcgtttttccataggctccgccctcctgccagagttcacataaacagacgcttttccggtgcatctgtgggagccgtgaggctcaaccatgaatctgacagtacgggcgaaacccgacaggacttaaagatccccaccgtttccggcgggtcgctccctcttgcgctctcctgttccgaccctgccgtttaccggatacctgttccgcctttctcccttacgggaagtgtggcgctttctcatagctcacacactggtatctcggctcggtgtaggtcgttcgctccaagctgggctgtaagcaagaactccccgttcagcccgactgctgcgccttatccggtaactgttcacttgagtccaacccggaaaagcacggtaaaacgccactggcagcagccattggtaactgggagttcgcagaggatttgtttagctaaacacgcggttgctcttgaagtgtgcgccaaagtccggctacactggaaggacagatttggttgctgtgctctgcgaaagccagttaccacggttaagcagttccccaactgacttaaccttcgatcaaaccacctccccaggtggttttttcgtttacagggcaaaagattacgcgcagaaaaaaaggatctcaagaagatcctttgatcttttctactgaaccgctctagatttcagtgcaatttatctcttcaaatgtagcacctgaagtcagccccatacgatataagttgtaattctcatgttagtcatgccccgcgcccaccggaaggagctgactgggttgaaggctctcaagggcatcggtcgagatcccggtgcctaatgagtgagctaacttacattaattgcgttgcgctcactgcccgctttccagtcgggaaacctgtcgtgccagctgcattaatgaatcggccaacgcgcggggagaggcggtttgcgtattgggcgccagggtggtttttcttttcaccagtgagacgggcaacagctgattgcccttcaccgcctggccctgagagagttgcagcaagcggtccacgctggtttgccccagcaggcgaaaatcctgtttgatggtggttaacggcgggatataacatgagctgtcttcggtatcgtcgtatcccactaccgagatgtccgcaccaacgcgcagcccggactcggtaatggcgcgcattgcgcccagcgccatctgatcgttggcaaccagcatcgcagtgggaacgatgccctcattcagcatttgcatggtttgttgaaaaccggacatggcactccagtcgccttcccgttccgctatcggctgaatttgattgcgagtgagatatttatgccagccagccagacgcagacgcgccgagacagaacttaatgggcccgctaacagcgcgatttgctggtgacccaatgcgaccagatgctccacgcccagtcgcgtaccgtcttcatgggagaaaataatactgttgatgggtgtctggtcagagacatcaagaaataacgccggaacattagtgcaggcagcttccacagcaatggcatcctggtcatccagcggatagttaatgatcagcccactgacgcgttgcgcgagaagattgtgcaccgccgctttacaggcttcgacgccgcttcgttctaccatcgacaccaccacgctggcacccagttgatcggcgcgagatttaatcgccgcgacaatttgcgacggcgcgtgcagggccagactggaggtggcaacgccaatcagcaacgactgtttgcccgccagttgttgtgccacgcggttgggaatgtaattcagctccgccatcgccgcttccactttttcccgcgttttcgcagaaacgtggctggcctggttcaccacgcgggaaacggtctgataagagacaccggcatactctgcgacatcgtataacgttactggtttcac

SEQ ID NO: 5197 - DNA, 11812 bp, synthetic construct
  source 1..11812: mol_type = other DNA
ttttctactgaaccgctctagatttcagtgcaatttatctcttcaaatgtagcacctgaagtcagccccatacgatataagttgtaattctcatgttagtcatgccccgcgcccaccggaaggagctgactgggttgaaggctctcaagggcatcggtcgagatcccggtgcctaatgagtgagctaacttacattaattgcgttgcgctcactgcccgctttccagtcgggaaacctgtcgtgccagctgcattaatgaatcggccaacgcgcggggagaggcggtttgcgtattgggcgccagggtggtttttcttttcaccagtgagacgggcaacagctgattgcccttcaccgcctggccctgagagagttgcagcaagcggtccacgctggtttgccccagcaggcgaaaatcctgtttgatggtggttaacggcgggatataacatgagctgtcttcggtatcgtcgtatcccactaccgagatgtccgcaccaacgcgcagcccggactcggtaatggcgcgcattgcgcccagcgccatctgatcgttggcaaccagcatcgcagtgggaacgatgccctcattcagcatttgcatggtttgttgaaaaccggacatggcactccagtcgccttcccgttccgctatcggctgaatttgattgcgagtgagatatttatgccagccagccagacgcagacgcgccgagacagaacttaatgggcccgctaacagcgcgatttgctggtgacccaatgcgaccagatgctccacgcccagtcgcgtaccgtcttcatgggagaaaataatactgttgatgggtgtctggtcagagacatcaagaaataacgccggaacattagtgcaggcagcttccacagcaatggcatcctggtcatccagcggatagttaatgatcagcccactgacgcgttgcgcgagaagattgtgcaccgccgctttacaggcttcgacgccgcttcgttctaccatcgacaccaccacgctggcacccagttgatcggcgcgagatttaatcgccgcgacaatttgcgacggcgcgtgcagggccagactggaggtggcaacgccaatcagcaacgactgtttgcccgccagttgttgtgccacgcggttgggaatgtaattcagctccgccatcgccgcttccactttttcccgcgttttcgcagaaacgtggctggcctggttcaccacgcgggaaacggtctgataagagacaccggcatactctgcgacatcgtataacgttactggtttcacattcaccaccctgaattgactctcttccgggcgctatcatgccataccgcgaaaggttttgcgccattcgatggtgtccgggatctcgacgctctcccttatgcgactcctgcattaggaaattaatacgactcactataggggaattgtgagcggataacaattcccctgtagaaataattttgtttaactttaataaggagatataccatgggtgaactgccgagtaggtagctgataacgccaacgggcgaacgttattgtgttaactctggtgaactgccgagtaggtagctgataacggatccgaattcgagcgaaggagatatacatatgtttttgcaaagacctaaaccttacagcgatgaaagtttagaaagtttctttatccgagtggctaacaaaaatggctacggtgatgtccatcgcttcctagaagccactaaacgattccttcaagacattgaccataatggctatcaaacctttccgactgatataactcggataaacccatactcagctaaaaacagttccagcgcacgaactgcgtcattcctgaaacttgcacaattgacatttaatgaaccgccagagctacttgggttggcaattaacagaacaaacatgaaatactcgccgtcaactagcgcggttgttagaggtgcagaagtctttcctcgcagtttactacggacgcactccatcccctgctgtcctttgtgtctgcgagaaaatggctacgcctcctacctttggcactttcaggggtacgaatactgccacagccataacgtacctttaattaccacttgtagctgtggtaaggagtttgactaccgagtatctgggttaaagggcatttgctgcaaatgcaaggagcctatcaccttaaccagcagggagaacggtcatgaggcagcgtgtactgtttcaaactggcttgctggccatgaatctaaacctctgccaaatcttcctaaaagctaccgatggggtttagttcattggtggatgggtattaaagatagcgagttcgatcacttttcgttcgttcaatttttctcaaactggccaaggtcattccactcgataatcgaagatgaagtagagttcaaccttgagcatgctgttgtcagcacgtctgaattacgactaaaagatcttcttggtcgattgtttttcggttcaattcggttacctgagcggaatcttcaacacaatatcatccttggtgagcttctctgctatttagaaaatcgtttatggcaagacaagggattaatcgccaacctcaaaatgaacgcgttagaggcgactgtaatgttaaattgtagcctcgatcagattgcatcaatggttgaacaacgcatcttgaagccaaatcgaaaaagcaagcccaacagccctcttgatgttaccgattatctatttcatttcggcgatattttctgtctttggttagctgagttccaaagcgatgagtttaaccgttcgttttatgtgtcgaggtggtaaatgcaaactctgaaagaactaatcgcatccaatcctgacgacttaacaactgaacttaagagagcatttcgtccactcacaccgcatattgcaattgatggtaatgaacttgacgcactgacgatattagtcaatttaaccgataagactgatgatcagaaagacctgctcgatcgagccaaatgcaagcaaaaacttcgagatgaaaaatggtgggctagctgcataaattgcgttaattacagacaaagccataacccaaaattcccggatatacgttctgaaggcgtgattcgaacccaagccctgggtgaattaccgagtttcctactctcgtcctcaaaaatcccaccataccattggtcatatagccatgattcaaaatacgtcaacaaaagcgcattcctcaccaatgagttttgttgggatggtgagatctcatgtttgggtgagcttcttaaagatgcagatcacccactttggaatactttgaaaaagttaggttgttctcaaaaaacttgcaaagcaatggcaaaacaactagctgatattactctcacgactatcaatgtcacactcgcaccaaattacctgactcaaatatctctccccgatagtgatacatcctacatttcactctctcctgttgcatcgctatcgatgcaaagccactttcatcagaggctccaagatgaaaatcggcatagcgcgataacgcggtttagccgaactaccaacatgggggtcactgcgatgacatgtggcggcgcatttagaatgttaaagtctggcgctaagttttccagcccccctcatcaccgattaaacagtaaacgaagttggttgacgtcagagcatgttcagtcattaaaacagtaccagcgcctcaacaaaagcctcatacctgaaaactctcggattgcactccgtagaaaatacaaaatcgagcttcaaaatatggtcagatcttggtttgcaatgcaagaccatacccttgattcgaacatacttatccaacatttgaatcatgacctatcttacttaggagccacaaaacgttttgcatacgatccagcgatgaccaagctctttactgagcttttgaaacgagagttatcaaattcaatcaataatggtgagcaacacactaatggatcgtttttagtcctaccgaatatcagggtttgtggcgcaacagctttaagctccccggtaacggtggggattccatcacttacagctttctttggcttcgttcacgcatttgaacggaatataaatcgcaccacctcatcgtttcgtgttgaatcctttgcgatatgcgtccatcaactacatgtcgagaagcgaggtttgacagcagagtttgtggaaaaaggcgacgggactatatccgctcccgcgacccgggatgactggcagtgtgatgtcgtatttagccttattttgaacaccaactttgctcaacatattgaccaagatacgttagttacatcactaccaaagcgattggctcggggttcagcaaaaattgcgattgatgactttaaacatatcaactcattctcgacattagaaacagcgatcgaatctctgccaatagaagctggtaggtggttatcactttacgcacagtcaaacaataatctaagtgatctattagcagccatgacagaggaccatcagctcatggcaagctgcgtcggttaccacttgttagaagagcccaaagataaaccaaactccctcagaggttacaaacacgctatcgccgagtgcatcattggactcattaactcaatcacctttagctcagagactgatcccaacacaatcttttggtcgctaaagaactatcaaaactacctagtggtacagccaaggagtatcaacgatgaaactaccgacaaatctagcctatgagcgctctatcgacccatcagatgtctgtttttttgtcgtctggcccgatgatagaaaaacacctttaacctacaattctcgtactctgctcgggcaaatggaagcggcatcattagcctatgatgtctcaggtcaaccaataaaaagtgccaccgctgaggcgttagctcaagggaaccctcatcaagttgatttctgccacgttccatacggtgcgagtcatattgaatgcagtttctccgtctcgttttcttctgaactacgtcaaccatataagtgtaactcaagcaaagttaaacaaacgctagtgcaattagtcgagctctacgaaacgaaaatcggctggactgagctagcaacccgatatttgatgaacatttgcaacggtaaatggctgtggaaaaatacccgtaaagcctattgctggaacattgtacttacaccttggccttggaacggggaaaaggttggatttgaagatattcgtactaactacacctcacggcaagactttaaaaataataaaaattggtctgctatagttgaaatgatcaaaaccgcattttctagtactgatgggctggcgatatttgaagtcagggccaccttgcacttgccaacgaatgctatggtgcggccaagccaagttttcacagaaaaagaaagtggcagtaaaagtaaatctaaaactcaaaacagtcgagtttttcagagtacaactattgatggtgaacgatcgccaatactaggggcctttaaaacgggagcagctattgcaaccattgacgactggtatcctgaagccactgagccactaagggtcggacggtttggggttcatcgcgaagatgtcacttgctaccgtcatccgtctaccggaaaagattttttctcgatattacaacaagcagagcactatattgaagtgttgagcgccaacaaaactcccgctcaagaaactatcaacgacatgcactttttaatggctaacctgattaagggtgggatgttccagcataaaggagactgactgtgaaatggtattataagacaatcacctttctgccagagttgtgcaacaacgagtcactggctgcaaagtgtctccgcgttctgcatggatttaactatcagtatgagacacgaaatatcggcgtttcatttccgctttggtgtgatgcaacggttggaaaaaagatttcatttgtcagcaagaacaagatagaactcgacttactacttaaacaacactatttcgtccaaatggaacaacttcaatactttcatatatccaacactgttctcgtcccagaagattgtacatacgtttcctttagacgctgtcaatctatagataagctcacagcagcagggctggcaaggaaaatcagacgcctggagaaacgtgctctatctagaggcgagcaatttgacccatcatcttttgctcaaaaagagcatactgcaatagcgcactaccactcacttggggagtccagcaaacagacgaaccgcaactttcgactcaatatcaggatgctctcggagcaaccccgtgaggggaactcgatttttagtagctatggcttatcaaattcagaaaactcgtttcagcctgtacccttaatctgacctttaataaggagatataccatggcgacaagtttacctacgccctcagcaattacgacttcggcgttagagtatgcattccatactcccgctcgcaatctaacgaaatctcgcggaaaaaacattcatcgttatgtcagtgtaaagatgagtaagaggattacggtagaatctactctagagtgtgatgcctgctatcactttgattttgagccaagtattgttcgcttttgcgctcaaccgattcgatttttatattatctcaatggtcagtctcactcctatgttcctgactttctagttcaatttgataccaacgagtttgttctatatgaagtaaagtcagcttatgctaagaacaaacctgattttgatgttgaatgggaggcgaaagtaaaagcagcaactgaactagggctagaattggagcttgttgaagagagtgatattagggatacggttgtattaaataatcttaagcgcatgcatcgttatgcttcgaaagatgagctgaataacgtacataactctctcttaaaaataataaagtacaatggcgcccaatctgcaagatgcttgggagaacagttgggtttaaaaggccgaactgttttaccaattttgtgcgatttgctgtcaaggtgtttactcgatacacgtttggataagcctctatctcttgaatctcgatttgagttggccagttatggctaagaaagggttctcaagtttccatagaaaagcagtctcttcccaagatacgcttgaatcgatagagcttgtctctagcgctaattgtctagaaagtgttacgtatcaagatatatcagcatttcccgaaacaattgcggtagagattaatttccgattaagcattcttcgctttttagcgcgaaagtgcgaaaccattgtggccaaatcaattgaaccacatcgtgtagagctacagcaaaactatagtagaaaaatacccagtgcaataacgatatatcgatggtggcttgcttttcgaaaatcagactacaaccccattagcttagcacctaatatcaaggatagaggtaatagagagacaaaagtgtcaacagttgttgattctattatggaacaggcagttgaaagagttatatctggacgaaaagtcaatgttagctctgcatataaacgtgttcgacgaaaagttcgtcaatacaatctaactcatggaacgaaatacacgtatcctaagtacgaatctgtaagaaagcgagtaaaaaagaaaaccccatttgagttattagccgcagggaaaggggagagagtagctaagagagagtttcgccgaatgggaaaaaagatcctcacgtctagcgtgctagagagggttgaaatagatcacactgtcgttgacctttttgcagtacacgaagagtatcgaatcccattgggccgaccttggcttactcaattggttgattgttacagtaaagctgtaatcggtttttatttaggtttcgagcctcctagctatgtgtcggtttcccttgcacttaagaatgcaatacaacgcaaagatgacttaatctcctcgtatgaatcgatcgagaatgaatggctatgttatggcatcccagacctactcgtaactgataatggtaaagagtttttgtcgaaagcatttgatcaagcatgtgaatcactattgatcaatgtgcatcaaaataaagttgagacgcccgacaacaaacctcatgttgaacgtaactacgggactattaatacttctctgttagacgatttacctgggaaatccttcagccagtaccttcaaagagaagggtacgactctgtgggagaagctacccttacactcaatgagattagagaaatttacttaatttggttggtggatatttatcataaaaaacccaatcagagaggcactaattgtcctaatgttgcgtggaaaaagggttgtcaagaatgggaaccagaggagttctctggttctaaagacgaattagactttaaatttgctattgttgattacaaacaacttactaaagtagggataactgtctacaaagaactgagttatagcaatgaccgtttagctgaatatagagggaagaaaggaaaccataaagttcagttcaagtataaccctgagtgtatggcagttatttgggtgttggatgaggatatgaatgagtactttacagttaatgcgattgactacgaatatgcaagtagagtatcactttggcaacataaatataacatgaaatatcaagcagaactaaattcagcagaatatgatgaggacaaggaaattgatgcagaaataaaaattgaagaaatcgcagatcgttcaattgttaagactaacaaaatcagagctcggaggcgtggcgctaggcatcaagagaatagcgcaagggctaagtcaatcagtaatgcgaacccggcctcgatacaaaaacatgaagatgaaatcgttagtgcagataatgacgattgggatattgattatgtctgagaaatcgtcaaatgagtgaaacgcgtgaggctcgtatatcaagagctaaaagggcatttgtatccacaccgagcgttaggaaaatcttgagttacatggatagatgtagagatctatcagacctagagtctgagcctacatgcatgatggtctatggtgcttcgggtgtaggtaaaacgaccgtcatcaagaaatacttaaatcaaaacagaagagagtccgaagccgggggcgatataataccggttttgcatattgagttgccagacaatgcgaagccagtagatgcagcaagggaattgctggttgaaatgggtgacccgctagcactttatgaaactgacttagctagattgacgaaaagactgactgaattaatccctgcggtcggcgtgaagctgattattatcgatgagttccaacatttggtggaagaaaggtcaaatcgggttcttacccaagtaggtaattggctaaaaatgatacttaacaaaacgaaatgtccaattgttatatttggtatgccatactcaaaagttgtactgcaagcaaactcgcaacttcacgggcgattttccattcaggttgaactgcgcccctttagctaccagggaggtagaggtgtatttaaaacttttttggaataccttgataaagccctaccttttgaaaaacaggctggcttagccaacgaaagtttgcagaaaaaattgtatgcattctctcagggaaacatgcgttcgttgagaaaccttatttatcaagcatctatcgaagcaattgataatcagcatgagacgataaccgaagaagatttcgtttttgcatcgaagttgacatcgggcgataaacccaactcatggaaaaatccttttgaggagggtgttgaggtaacagaagatatgttacgaccgccaccaaaagatattggttgggaggactatttgagacattcaaccccgagagtgagtaaaccaggtagaaataaaaactttttcgaataacctaggctgctgcgctgctgccaccgctgagcaataactagcataaccccttggggcctctaaacgggtcttgaggggttttttgctgaaacctcaggcatttgagaagcacacggtcacactgcttccggtagtcaataaaccggtaaaccagcaatagacataagcggctatttaacgaccctgccctgaaccgacgaccgggtcatcgtggccggatcttgcggcccctcggcttgaacgaattgttagacattatttgccgactaccttggtgatctcgcctttcacgtagtggacaaattcttccaactgatctgcgcgcgaggccaagcgatcttcttcttgtccaagataagcctgtctagcttcaagtatgacgggctgatactgggccggcaggcgctccattgcccagtcggcagcgacatccttcggcgcgattttgccggttactgcgctgtaccaaatgcgggacaacgtaagcactacatttcgctcatcgccagcccagtcgggcggcgagttccatagcgttaaggtttcatttagcgcctcaaatagatcctgttcaggaaccggatcaaagagttcctccgccgctggacctaccaaggcaacgctatgttctcttgcttttgtcagcaagatagccagatcaatgtcgatcgtggctggctcgaagatacctgcaagaatgtcattgcgctgccattctccaaattgcagttcgcgcttagctggataacgccacggaatgatgtcgtcgtgcacaacaatggtgacttctacagcgcggagaatctcgctctctccaggggaagccgaagtttccaaaaggtcgttgatcaaagctcgccgcgttgtttcatcaagccttacggtcaccgtaaccagcaaatcaatatcactgtgtggcttcaggccgccatccactgcggagccgtacaaatgtacggccagcaacgtcggttcgagatggcgctcgatgacgccaactacctctgatagttgagtcgatacttcggcgatcaccgcttccctcatactcttcctttttcaatattattgaagcatttatcagggttattgtctcatgagcggatacatatttgaatgtatttagaaaaataaacaaatagctagctcactcggtcgctacgctccgggcgtgagactgcggcgggcgctgcggacacatacaaagttacccacagattccgtggataagcaggggactaacatgtgaggcaaaacagcagggccgcgccggtggcgtttttccataggctccgccctcctgccagagttcacataaacagacgcttttccggtgcatctgtgggagccgtgaggctcaaccatgaatctgacagtacgggcgaaacccgacaggacttaaagatccccaccgtttccggcgggtcgctccctcttgcgctctcctgttccgaccctgccgtttaccggatacctgttccgcctttctcccttacgggaagtgtggcgctttctcatagctcacacactggtatctcggctcggtgtaggtcgttcgctccaagctgggctgtaagcaagaactccccgttcagcccgactgctgcgccttatccggtaactgttcacttgagtccaacccggaaaagcacggtaaaacgccactggcagcagccattggtaactgggagttcgcagaggatttgtttagctaaacacgcggttgctcttgaagtgtgcgccaaagtccggctacactggaaggacagatttggttgctgtgctctgcgaaagccagttaccacggttaagcagttccccaactgacttaaccttcgatcaaaccacctccccaggtggttttttcgtttacagggcaaaagattacgcgcagaaaaaaaggatctcaagaagatcctttgatc

SEQ ID NO: 5198 - DNA, 5388 bp, synthetic construct
  source 1..5388: mol_type = other DNA
atgctgttcatctgttacattgtcgatctgttcatggtgaacagctttgaatgcaccaaaaactcgtaaaagctctgatgtatctatcttttttacaccgttttcatctgtgcatatggacagttttccctttgatatgtaacggtgaacagttgttctacttttgtttgttagtcttgatgcttcactgatagatacaagagccataagaacctcagatccttccgtatttagccagtatgttctctagtgtggttcgttgtttttgcgtgagccatgagaacgaaccattgagatcatacttactttgcatgtcactcaaaaattttgcctcaaaactggtgagctgaatttttgcagttaaagcatcgtgtagtgtttttcttagtccgttatgtaggtaggaatctgatgtaatggttgttggtattttgtcaccattcatttttatctggttgttctcaagttcggttacgagatccatttgtctatctagttcaacttggaaaatcaacgtatcagtcgggcggcctcgcttatcaaccaccaatttcatattgctgtaagtgtttaaatctttacttattggtttcaaaacccattggttaagccttttaaactcatggtagttattttcaagcattaacatgaacttaaattcatcaaggctaatctctatatttgccttgtgagttttcttttgtgttagttcttttaataaccactcataaatcctcatagagtatttgttttcaaaagacttaacatgttccagattatattttatgaatttttttaactggaaaagataaggcaatatctcttcactaaaaactaattctaatttttcgcttgagaacttggcatagtttgtccactggaaaatctcaaagcctttaaccaaaggattcctgatttccacagttctcgtcatcagctctctggttgctttagctaatacaccataagcattttccctactgatgttcatcatctgagcgtattggttataagtgaacgataccgtccgttctttccttgtagggttttcaatcgtggggttgagtagtgccacacagcataaaattagcttggtttcatgctccgttaagtcatagcgactaatcgctagttcatttgctttgaaaacaactaattcagacatacatctcaattggtctaggtgattttaatcactataccaattgagatgggctagtcaatgataattactagtccttttcctttgagttgtgggtatctgtaaattctgctagacctttgctggaaaacttgtaaattctgctagaccctctgtaaattccgctagacctttgtgtgttttttttgtttatattcaagtggttataatttatagaataaagaaagaataaaaaaagataaaaagaatagatcccagccctgtgtataactcactactttagtcagttccgcagtattacaaaaggatgtcgcaaacgctgtttgctcctctacaaaacagaccttaaaaccctaaaggcttaagtagcaccctcgcaagctcgggcaaatcgctgaatattccttttgtctccgaccatcaggcacctgagtcgctgtctttttcgtgacattcagttcgctgcgctcacggctctggcagtgaatgggggtaaatggcactacaggcgccttttatggattcatgcaaggaaactacccataatacaagaaaagcccgtcacgggcttctcagggcgttttatggcgggtctgctatgtggtgctatctgactttttgctgttcagcagttcctgccctctgattttccagtctgaccacttcggattatcccgtgacaggtcattcagactggctaatgcacccagtaaggcagcggtatcatcaacaggcttacccgtcttactgtccagctgtctcttatacacatctccgctgtgctttcagtggatttcggataacagaaaggccgggaaatacccagcctcgctttgtaacggagtagacgaaagtgattgcgcctacgtatgtgcagctaactctcacatttgttgatacaaccataaaatgataattacacccataaattgataattatcacacccatggaggtagtgctggaggtggatctagcaaaggagaagaacttttcactggagttgtcccaattcttgttgaattagatggtgatgttaatgggcacaaattttctgtccgtggagagggtgaaggtgatgctacaaacggaaaactcacccttaaatttatttgcactactggaaaactacctgttccgtggccaacacttgtcactactctgacctatggtgttcaatgcttttcccgttatccggatcacatgaaacggcatgactttttcaagagtgccatgcccgaaggttatgtacaggaacgcactatatctttcaaagatgacgggacctacaagacgcgtgctgaagtcaagtttgaaggtgatacccttgttaatcgtatcgagttaaagggtattgattttaaagaagatggaaacattcttggacacaaactcgagtacaactttaactcacacaatgtatacatcacggcagacaaacaaaagaatggaatcaaagctaacttcaaaattcgccacaacgttgaagatggttccgttcaactagcagaccattatcaacaaaatactccaattggcgatggccctgtccttttaccagacaaccattacctgtcgacacaatctgtcctttcgaaagatcccaacgaaaagcgtgaccacatggtccttcttgagtttgtaactgctgctgggattacacatggctgagcaataactagcataaccccttggggcctctaaacgggtcttgaggggttttttgctgaaacctcaggcatttgttcttactgcagtagttttgctgaaatactcgattcacaaaaatatcaacttatggttgttttgtgagatatcaatatatggttgttttgtggttaagttgctgattataaataattattaaatatcactttatggttgcatcaacaacattcactgtaatgcgagcttcaactcacgttaagggattttggtcatgagattatcaaaaaggatcttcacctagatccttttaaattaaaaatgaagttttaaatcaatctaaagtatatatgagtaaacttggtctgacagttaccaatgcttaatcagtgaggcacctatctcagcgatctgtctatttcgttcatccatagttgcctgactccccgtcgtgtagataactacgatacgggagggcttaccatctggccccagtgctgcaatgataccgcgagacccacgctcaccggctccagatttatcagcaataaaccagccagccggaagggccgagcgcagaagtggtcctgcaactttatccgcctccatccagtctattaattgttgccgggaagctagagtaagtagttcgccagttaatagtttgcgcaacgttgttgccattgctgcaggcatcgtggtgtcacgctcgtcgtttggtatggcttcattcagctccggttcccaacgatcaaggcgagttacatgatcccccatgttgtgcaaaaaagcggttagctccttcggtcctccgatcgttgtcagaagtaagttggccgcagtgttatcactcatggttatggcagcactgcataattctcttactgtcatgccatccgtaagatgcttttctgtgactggtgagtactcaaccaagtcattctgagaatagtgtatgcggcgaccgagttgctcttgcccggcgtcaacacgggataataccgcgccacatagcagaactttaaaagtgctcatcattggaaaacgttcttcggggcgaaaactctcaaggatcttaccgctgttgagatccagttcgatgtaacccactcgtgcacccaactgatcttcagcatcttttactttcaccagcgtttctgggtgagcaaaaacaggaaggcaaaatgccgcaaaaaagggaataagggcgacacggaaatgttgaatactcatactcttcctttttcaatattattgaagcatttatcagggttattgtctcatgagcggatacatatttgaatgaattcaatccatttactatgttatgttctgaggggagtgaaaattcccctaattcgatgaagattcttgctcaattgttatcagctatgcgccgaccagaacaccttgccgatcagccaaacgtctcttcaggccactgactagcgataactttccccacaacggaacaactctcattgcatgggatcattgggtactgtgggtttagtggttgtaaaaacacctgaccgctatccctgatcagtttcttgaaggtaaactcatcacccccaagtctggctatgcagaaatcacctggctcaacagcctgctcagggtcaacgagaattaacattccgtcaggaaagcttggcttggagcctgttggtgcggtcatggaattaccttcaacctcaagccagaatgcagaatcactggcttttttggttgtgcttacccatctctccgcatcacctttggtaaaggttctaagcttaggtgagaacatccctgcctgaacatgagaaaaaacagggtactcatactcacttctaagtgacggctgcatactaaccgcttcatacatctcgtagatttctctggcgattgaagggctaaattcttcaacgctaactttgagaatttttgtaagcaatgcggcgttataagcatttaatgcattgatgccattaaataaagcaccaacgcctgactgccccatccccatcttgtctgcgacagattcctgggataagccaagttcatttttctttttttcataaattgctttaaggcgacgtgcgtcctcaagctgctcttgtgttaatggtttcttttttgtgctcatacgttaaatctatcaccgcaagggataaatatctaacaccgtgcgtgttgactattttacctctggcggtgataatggttgcatgtactaaggaggttgtatggaacaacgagatgtgtataagagacagctgacgggttttgctgcccgcaaacgggctgttctggtgttgctagtttgttatcagaatcgcagatccggcttcaggtttgccggctgaaagcgctatttcttccagaattgccatgattttttccccacgggaggcgtcactggctcccgtgttgtcggcagctttgattcgataagcagcatcgcctgtttcaggctgtctatgtgtgactgttgagctgtaacaagttgtctcaggtgttcaatttcatgttctagttgctttgttttactggtttcacctgttctattaggtgttac

SEQ ID NO: 5199 - DNA, 5388 bp, synthetic construct
  source 1..5388: mol_type = other DNA
atgctgttcatctgttacattgtcgatctgttcatggtgaacagctttgaatgcaccaaaaactcgtaaaagctctgatgtatctatcttttttacaccgttttcatctgtgcatatggacagttttccctttgatatgtaacggtgaacagttgttctacttttgtttgttagtcttgatgcttcactgatagatacaagagccataagaacctcagatccttccgtatttagccagtatgttctctagtgtggttcgttgtttttgcgtgagccatgagaacgaaccattgagatcatacttactttgcatgtcactcaaaaattttgcctcaaaactggtgagctgaatttttgcagttaaagcatcgtgtagtgtttttcttagtccgttatgtaggtaggaatctgatgtaatggttgttggtattttgtcaccattcatttttatctggttgttctcaagttcggttacgagatccatttgtctatctagttcaacttggaaaatcaacgtatcagtcgggcggcctcgcttatcaaccaccaatttcatattgctgtaagtgtttaaatctttacttattggtttcaaaacccattggttaagccttttaaactcatggtagttattttcaagcattaacatgaacttaaattcatcaaggctaatctctatatttgccttgtgagttttcttttgtgttagttcttttaataaccactcataaatcctcatagagtatttgttttcaaaagacttaacatgttccagattatattttatgaatttttttaactggaaaagataaggcaatatctcttcactaaaaactaattctaatttttcgcttgagaacttggcatagtttgtccactggaaaatctcaaagcctttaaccaaaggattcctgatttccacagttctcgtcatcagctctctggttgctttagctaatacaccataagcattttccctactgatgttcatcatctgagcgtattggttataagtgaacgataccgtccgttctttccttgtagggttttcaatcgtggggttgagtagtgccacacagcataaaattagcttggtttcatgctccgttaagtcatagcgactaatcgctagttcatttgctttgaaaacaactaattcagacatacatctcaattggtctaggtgattttaatcactataccaattgagatgggctagtcaatgataattactagtccttttcctttgagttgtgggtatctgtaaattctgctagacctttgctggaaaacttgtaaattctgctagaccctctgtaaattccgctagacctttgtgtgttttttttgtttatattcaagtggttataatttatagaataaagaaagaataaaaaaagataaaaagaatagatcccagccctgtgtataactcactactttagtcagttccgcagtattacaaaaggatgtcgcaaacgctgtttgctcctctacaaaacagaccttaaaaccctaaaggcttaagtagcaccctcgcaagctcgggcaaatcgctgaatattccttttgtctccgaccatcaggcacctgagtcgctgtctttttcgtgacattcagttcgctgcgctcacggctctggcagtgaatgggggtaaatggcactacaggcgccttttatggattcatgcaaggaaactacccataatacaagaaaagcccgtcacgggcttctcagggcgttttatggcgggtctgctatgtggtgctatctgactttttgctgttcagcagttcctgccctctgattttccagtctgaccacttcggattatcccgtgacaggtcattcagactggctaatgcacccagtaaggcagcggtatcatcaacaggcttacccgtcttactgtccagctgtctcttatacacatctccgctgtgctttcagtggatttcggataacagaaaggccgggaaatacccagcctcgctttgtaacggagtagacgaaagtgattgcgcctacgtatgtgcagctaactctcacatttgttgatacaaccataaaaggattattacacccattaattgataattatcacacccatggaggtagtgctggaggtggatctagcaaaggagaagaacttttcactggagttgtcccaattcttgttgaattagatggtgatgttaatgggcacaaattttctgtccgtggagagggtgaaggtgatgctacaaacggaaaactcacccttaaatttatttgcactactggaaaactacctgttccgtggccaacacttgtcactactctgacctatggtgttcaatgcttttcccgttatccggatcacatgaaacggcatgactttttcaagagtgccatgcccgaaggttatgtacaggaacgcactatatctttcaaagatgacgggacctacaagacgcgtgctgaagtcaagtttgaaggtgatacccttgttaatcgtatcgagttaaagggtattgattttaaagaagatggaaacattcttggacacaaactcgagtacaactttaactcacacaatgtatacatcacggcagacaaacaaaagaatggaatcaaagctaacttcaaaattcgccacaacgttgaagatggttccgttcaactagcagaccattatcaacaaaatactccaattggcgatggccctgtccttttaccagacaaccattacctgtcgacacaatctgtcctttcgaaagatcccaacgaaaagcgtgaccacatggtccttcttgagtttgtaactgctgctgggattacacatggctgagcaataactagcataaccccttggggcctctaaacgggtcttgaggggttttttgctgaaacctcaggcatttgttcttactgcagtagttttgctgaaatactcgattcacaaaaatatcaacttatggttgttttgtgagatatcaatatatggttgttttgtggttaagttgctgattataaataattattaaatatcactttatggttgcatcaacaacattcactgtaatgcgagcttcaactcacgttaagggattttggtcatgagattatcaaaaaggatcttcacctagatccttttaaattaaaaatgaagttttaaatcaatctaaagtatatatgagtaaacttggtctgacagttaccaatgcttaatcagtgaggcacctatctcagcgatctgtctatttcgttcatccatagttgcctgactccccgtcgtgtagataactacgatacgggagggcttaccatctggccccagtgctgcaatgataccgcgagacccacgctcaccggctccagatttatcagcaataaaccagccagccggaagggccgagcgcagaagtggtcctgcaactttatccgcctccatccagtctattaattgttgccgggaagctagagtaagtagttcgccagttaatagtttgcgcaacgttgttgccattgctgcaggcatcgtggtgtcacgctcgtcgtttggtatggcttcattcagctccggttcccaacgatcaaggcgagttacatgatcccccatgttgtgcaaaaaagcggttagctccttcggtcctccgatcgttgtcagaagtaagttggccgcagtgttatcactcatggttatggcagcactgcataattctcttactgtcatgccatccgtaagatgcttttctgtgactggtgagtactcaaccaagtcattctgagaatagtgtatgcggcgaccgagttgctcttgcccggcgtcaacacgggataataccgcgccacatagcagaactttaaaagtgctcatcattggaaaacgttcttcggggcgaaaactctcaaggatcttaccgctgttgagatccagttcgatgtaacccactcgtgcacccaactgatcttcagcatcttttactttcaccagcgtttctgggtgagcaaaaacaggaaggcaaaatgccgcaaaaaagggaataagggcgacacggaaatgttgaatactcatactcttcctttttcaatattattgaagcatttatcagggttattgtctcatgagcggatacatatttgaatgaattcaatccatttactatgttatgttctgaggggagtgaaaattcccctaattcgatgaagattcttgctcaattgttatcagctatgcgccgaccagaacaccttgccgatcagccaaacgtctcttcaggccactgactagcgataactttccccacaacggaacaactctcattgcatgggatcattgggtactgtgggtttagtggttgtaaaaacacctgaccgctatccctgatcagtttcttgaaggtaaactcatcacccccaagtctggctatgcagaaatcacctggctcaacagcctgctcagggtcaacgagaattaacattccgtcaggaaagcttggcttggagcctgttggtgcggtcatggaattaccttcaacctcaagccagaatgcagaatcactggcttttttggttgtgcttacccatctctccgcatcacctttggtaaaggttctaagcttaggtgagaacatccctgcctgaacatgagaaaaaacagggtactcatactcacttctaagtgacggctgcatactaaccgcttcatacatctcgtagatttctctggcgattgaagggctaaattcttcaacgctaactttgagaatttttgtaagcaatgcggcgttataagcatttaatgcattgatgccattaaataaagcaccaacgcctgactgccccatccccatcttgtctgcgacagattcctgggataagccaagttcatttttctttttttcataaattgctttaaggcgacgtgcgtcctcaagctgctcttgtgttaatggtttcttttttgtgctcatacgttaaatctatcaccgcaagggataaatatctaacaccgtgcgtgttgactattttacctctggcggtgataatggttgcatgtactaaggaggttgtatggaacaacgagatgtgtataagagacagctgacgggttttgctgcccgcaaacgggctgttctggtgttgctagtttgttatcagaatcgcagatccggcttcaggtttgccggctgaaagcgctatttcttccagaattgccatgattttttccccacgggaggcgtcactggctcccgtgttgtcggcagctttgattcgataagcagcatcgcctgtttcaggctgtctatgtgtgactgttgagctgtaacaagttgtctcaggtgttcaatttcatgttctagttgctttgttttactggtttcacctgttctattaggtgttac

SEQ ID NO: 5200 - DNA, 4383 bp, synthetic construct
  source 1..4383: mol_type = other DNA
caggcgtttcccctggcggctccctcgtgcgctctcctgttcctgcctttcggtttaccggtgtcattccgctgttatggccgcgtttgtctcattccacgcctgacactcagttccgggtaggcagttcgctccaagctggactgtatgcacgaaccccccgttcagtccgaccgctgcgccttatccggtaactatcgtcttgagtccaacccggaaagacatgcaaaagcaccactggcagcagccactggtaattgatttagaggagttagtcttgaagtcatgcgccggttaaggctaaactgaaaggacaagttttggtgactgcgctcctccaagccagttacctcggttcaaagagttggtagctcagagaaccttcgaaaaaccgccctgcaaggcggttttttcgttttcagagcaagagattacgcgcagaccaaaacgatctcaagaagatcatcttattaatcagataaaatatttctagatttcagtgcaatttatctcttcaaatgtagcacctgaagtcagccccatacgatataagttgtaattctcatgttagtcatgccccgcgcccaccggaaggagctgactgggttgaaggctctcaagggcatcggtcgagatcccggtgcctaatgagtgagctaacttacattaattgcgttgcgctcactgcccgctttccagtcgggaaacctgtcgtgccagctgcattaatgaatcggccaacgcgcggggagaggcggtttgcgtattgggcgccagggtggtttttcttttcaccagtgagacgggcaacagctgattgcccttcaccgcctggccctgagagagttgcagcaagcggtccacgctggtttgccccagcaggcgaaaatcctgtttgatggtggttaacggcgggatataacatgagctgtcttcggtatcgtcgtatcccactaccgagatgtccgcaccaacgcgcagcccggactcggtaatggcgcgcattgcgcccagcgccatctgatcgttggcaaccagcatcgcagtgggaacgatgccctcattcagcatttgcatggtttgttgaaaaccggacatggcactccagtcgccttcccgttccgctatcggctgaatttgattgcgagtgagatatttatgccagccagccagacgcagacgcgccgagacagaacttaatgggcccgctaacagcgcgatttgctggtgacccaatgcgaccagatgctccacgcccagtcgcgtaccgtcttcatgggagaaaataatactgttgatgggtgtctggtcagagacatcaagaaataacgccggaacattagtgcaggcagcttccacagcaatggcatcctggtcatccagcggatagttaatgatcagcccactgacgcgttgcgcgagaagattgtgcaccgccgctttacaggcttcgacgccgcttcgttctaccatcgacaccaccacgctggcacccagttgatcggcgcgagatttaatcgccgcgacaatttgcgacggcgcgtgcagggccagactggaggtggcaacgccaatcagcaacgactgtttgcccgccagttgttgtgccacgcggttgggaatgtaattcagctccgccatcgccgcttccactttttcccgcgttttcgcagaaacgtggctggcctggttcaccacgcgggaaacggtctgataagagacaccggcatactctgcgacatcgtataacgttactggtttcacattcaccaccctgaattgactctcttccgggcgctatcatgccataccgcgaaaggttttgcgccattcgatggtgtccgggatctcgacgctctcccttatgcgactcctgcattaggaaattaatacgactcactataggggaattgtgagcggataacaattcccctgtagaaataattttgtttaactttaataaggagatataccatggcgcttacaaaagctgaaatgtcagaatatctgtttgataagcttgggcttagcaagcgggatgccaaagaactggttgaactgtttttcgaagagatccgtcgcgctctggaaaacggcgaacaggtgaaactctctggttttggtaacttcgatctgcgtgataagaatcaacgcccgggacgtaacccgaaaacgggcgaggatattcccattacagcacggcgcgtggtgaccttcagacccgggcagaagttaaaaagccgggtcgaaaacgcttcgcccaaagacgagtaagcggccgcataatgcttaagtcgaacagaaagtaatcgtattgtacacggccgcataatcgaaattaatacgactcactataggggaattgtgagcggataacaattccccatcttagtatattagttaagtataagaaggagatatacatatgaccaagtcagaattgatagaaagacttgccacccagcaatcgcacattcccgccaagacggttgaagatgcagtaaaagagatgctggagcatatggcctcgactcttgcgcagggcgagcgtattgaaatccgcggtttcggcagtttctctttgcactaccgcgcaccacgtaccggacgtaatccgaagactggcgataaagtagaactggaaggaaaatacgttcctcactttaaacctggtaaagaactgcgcgatcgcgccaatatttacggttaacctaggctgctgccaccgctgagcaataactagcataaccccttggggcctctaaacgggtcttgaggggttttttgctgaaacctcaggcatttgagaagcacacggtcacactgcttccggtagtcaataaaccggtaaaccagcaatagacataagcggctatttaacgaccctgccctgaaccgacgaccgggtcgaatttgctttcgaatttctgccattcatccgcttattatcacttattcaggcgtagcaaccaggcgtttaagggcaccaataactgccttaaaaaaattacgccccgccctgccactcatcgcagtactgttgtaattcattaagcattctgccgacatggaagccatcacaaacggcatgatgaacctgaatcgccagcggcatcagcaccttgtcgccttgcgtataatatttgcccatagtgaaaacgggggcgaagaagttgtccatattggccacgtttaaatcaaaactggtgaaactcacccagggattggctgagacgaaaaacatattctcaataaaccctttagggaaataggccaggttttcaccgtaacacgccacatcttgcgaatatatgtgtagaaactgccggaaatcgtcgtggtattcactccagagcgatgaaaacgtttcagtttgctcatggaaaacggtgtaacaagggtgaacactatcccatatcaccagctcaccgtctttcattgccatacggaactccggatgagcattcatcaggcgggcaagaatgtgaataaaggccggataaaacttgtgcttatttttctttacggtctttaaaaaggccgtaatatccagctgaacggtctggttataggtacattgagcaactgactgaaatgcctcaaaatgttctttacgatgccattgggatatatcaacggtggtatatccagtgatttttttctccattttagcttccttagctcctgaaaatctcgataactcaaaaaatacgcccggtagtgatcttatttcattatggtgaaagttggaacctcttacgtgccgatcaacgtctcattttcgccaaaagttggcccagggcttcccggtatcaacagggacaccaggatttatttattctgcgaagtgatcttccgtcacaggtatttattcggcgcaaagtgcgtcgggtgatgctgccaacttactgatttagtgtatgatggtgtttttgaggtgctccagtggcttctgtttctatcagctgtccctcctgttcagctactgacggggtggtgcgtaacggcaaaagcaccgccggacatcagcgctagcggagtgtatactggcttactatgttggcactgatgagggtgtcagtgaagtgcttcatgtggcaggagaaaaaaggctgcaccggtgcgtcagcagaatatgtgatacaggatatattccgcttcctcgctcactgactcgctacgctcggtcgttcgactgcggcgagcggaaatggcttacgaacggggcggagatttcctggaagatgccaggaagatacttaacagggaagtgagagggccgcggcaaagccgtttttccataggctccgcccccctgacaagcatcacgaaatctgacgctcaaatcagtggtggcgaaacccgacaggactataaagatac

SEQ ID NO: 5201 - DNA, 13345 bp, synthetic construct
  source 1..13345: mol_type = other DNA
aacgtggctggcctggttcaccacgcgggaaacggtctgataagagacaccggcatactctgcgacatcgtataacgttactggtttcacattcaccaccctgaattgactctcttccgggcgctatcatgccataccgcgaaaggttttgcgccattcgatggtgtccgggatctcgacgctctcccttatgcgactcctgcattaggaaattaatacgactcactataggggaattgtgagcggataacaattcccctgtagaaataattttgtttaactttaataaggagatataccatgggtaacctgccggataggcagccaagaatagtacagcgcggctgaaatcatcattaaagcgctattatgctggaaaagcagttaaacattagcgaattccgagcgaaggagatatacatatgcttaatccaatagagctttatgaagatgaatcgctagagagctgtttattaaggatcagtcagaataattgctatgattcatttcaggattttagcgatgaagtttggtttcaagtcaaagaagaggatcgtgaggttcgaggaactttccctgcaaccctaaatacggtaaatatctatcactctcacacatcaagtgacttaaagctcaaagcactaattaaaattgagcagtggcttgagataaataactcccctttattaaaaagcgccttgagcagatcaagcagtactttcttacgccaacattctgctgtttttagaaatggtgttgatataccaagaatcctgctcagaaaaaatggtattccagtatgccctgagtgcctaaaagagaacgaatacatacgtcaagaatggcacttcatcactcacgatgtatgcacaaggcataaaataggtctattacatcactgcccagagtgtaaagcctctatcaattatcaaaaaattgaaaacattacggtttgtcagtgtggattcaaattcagtgatcacttagctccgcaagcaaatagcaatgccttactcattgcacaatggcttaacggcgaaaatactaaattagctaatatttggggagaacaccaagcaatatcatctcgctttggtgtcttactttggtatatcaatagatataatctgacagatgatttttctacttcatttgtaaaatattcattgaattggccctcgaacttctattccgaactcgatgagcaaatagataaagctaaaacagttcagattaaaccatttaataagatattttttaatgagatatttgataacctgttattagattgccaacgcttacctacacgagaatttaaaacgaatcccatattaagtcatgtatatcagtactttctatctcgctaccaaattcaacctaactctgatgttttctcaatcttgctaagcccattagaggcatcgagcttgctttcttgcactaccgatcaaatctatcgtttatatgaattaggttttcttaaattaggcgttaggccaaaactgcatcaaaaaatagcaagtcaccaatcagtttttacactctcaagtattattctagtcaaactttcaaacatgcaatccagtcaagatgaattgcatcactacctttcagcgtggtaactaatggaatttacagatattctcatcattcaagatgtaaaggaacgcaacagagctttcaaggttgcatttgctcactactcttcagctatttttattgatgatcatgaagtcgaagcgattacatgcctacttaatttgtgtacgccaaaaacggaggattacctagacaaaactagcgcatctctgtttttaaataatcatgataatattcaaaagtgtcttgacgaacttaagtggttccatagtcacaatgttaaatatccagattgccgagttaaggggcaaagcattatttctttaccaatcgattcagtaagtaacaccataaacagtaatgtagttccttatcgattaggttggtcccatgacagtggaaaggttaactatactcattttctactctcttgctttaaatggagaggagtacaaacaactcttagtcaattattcataaccgacacgctgttttggttagacatcataaaaaaaatacaatgtaactggaccaagaaacaaactgagcaatttattcattccatacaaaaagaaatgcctgcaaaaacacttccagaagatattagcccatactcaaaacagatcttattcccatataaaaatgactatctaactttaactcctgttacttctaactcaattcaaacatggttagaacaccaatctaggaaacctaatgatattcgctggattaaacgagaaagtaagcaccctgctagtgtaggcgctttatcatcttctatcggtggataccatagcttactatcttcgctaccaagcacatcacaatcaccacactcgtatcacgataatatgactagcaaaactgaatgtagagaggctttttgtgcttcagctatcactgagaaaagtacgactgacgcattacaaaggctcatcagttctgaagtaagaatgaatgtgaaacatagaaaacaaatcagaaaatcagggattcatttcattagacaaaaaatagctctttggcttactcctctgattcgatggagagatcatatagataataaccagatacaaatcactaatgaccatccatcattagttaacctattcttgtcgtctcctattgctaattttcccgatttattaacaccattgcataatcacctaaatcaaactctaggaaataataaatacacaaaacgctttgcttatcaccctgatttaatgcctattttcaaatcacaaatttcatggattctgaataaactaacacaagatgaaaatataaatcagcagcccgttttaactagaacccaatttatccatcttaaaaatttaaggctatacaatggcaatgcgttaagctccccctatgtttgtggactaccttcactaactggtttttgggggtttatgcatgacttcgagcgaagattaaaaacaaagattgaagaaaacattcattttgaggctttcagcctatttgttcatcaatatgaattacaatcatctcctccgctctgtgaggcttcggatgtttataaaaaaagagaactatcacctgcaaaacgtttattaacgcaaccttcttattcttgtgatatgcgttttgacctcattatcaaagttcacactgaggttaatttaagcgatattagtcaacgtatgcaatctgcaatgcctgctcgttgtgttggtggtacgttacatcaaccttcgttacatgagagcttagaatggcttagaacctatacatcgtctgagcatttatttgaagaattagcttgccttcctaactctggtcgctggatatacccaccatcggaaacatttaacactccagatgaatttctttctatattgggaaatagcacacaccttgctatttgtaatggttattcatttcttgaagatcctacatatagagagaatgtgagccttaatcaacacgtattttgtgaacctttaattggattagcagagcaagtaatacctatagatatgagacttaaccgacaaaaacattatttttcaaatgctttttggtcgatcaatagtgatttcaattctattcttatttcaaaagcatgagtaaggatacgctatgaagctttgtaataacctgaactacactcgatcattgtcaccgggaaaggctgttttttattatgaaagtaaagatggtcaaatgaatcctattaagtgtgagcaaactcatttaagagcgcctaaagctggattttcagaggcttttaatagcgattactcaactaaaaacactgctccacaagatctctcctttagtaaccctcaatttattgaagagtgttatgttcctgttggtattgatgaaatcaaaattcgattttcattacgtatagaagcaaattcattacaaccagataaatgctctgatattcaaattagagaaatattgcaagcattcgccactaaatataaagaaaatggcggctatcaagaacttggtgaacgatacgcaaaaaacttactttctggtacttggctatggcggaatgagcataatctaggtacaagtatttcaataaaaacaacaagtaaccaagaatttaatatcaataatgcctttaagctatcaagaaaaacctccgctaaagataaaaaaacaatatcaaagttaggaagtgaaatcgcaagtgcattatctgaccctgaccattattactttgccgatataacagcaacaatcaatgtggctttctgccaagaaatttatcctagccaagagtttttagacactaaagaaaaagggaagccaagcaaagtatatgcaaaaacgtcacttcaaactggtgaaaaaaccattgcttttcatgcacaaaagattggagctgcaattcaacttatcgacgattggtgggctgacgatgccgatattccattaagagtaaatgagtttggtgctgatcatcacaatgtcatagccagaaggcacccctcacatcgtaatgacttttataccttaattcaaaacgctgataactactgcgcgcaactgaatgaaaattcagatattactgatgatatgcattacgttatggctgtattagtaaaaggaggactgtttcaaaaaagtgcttcttcaaaaaaaggaaagtagatgctcactcactattttagtattacgtatgtgcctgatgattgtgataatgagttattggcaggacgttgcatcgctgaatttcacaagtttatctctagtctaaggctgatagaaaacaactcttttgccattggcttcccaaattggtctgaacaaagtattgggaatgaatttgctattttttctgataactctgaattattaagtgccattaagtaccagccctatttcaatttaatgaagagtgaggaattattttctattacagacatcaagcctgtgccaaataatcttcctcaaataagattcatcagaaaccagtctattgggaaaatatttataggttcaaaaaaacgtagaatccagcgttcaatcacaagaaataataaagagcatacacctatatcaaatgaggacagagagtttgataccttccacaaagtgtcgtgctctagtaaaagtaaacagcaacaatttatccttcatattcaaaaagacatcaccccgagaactacagactctaacgatagctacaatagttatggcttagcgacaaatagtaaacatttaggcactgttcctgatttatcaaaaatacctttttattgcgaggacaaattatcaaataaagatcaatgacctttaataaggagatatagcatgtacgttcgtacactaaaacaatctcaagtaaaaaacattagcaaatttatgagcctgaagaatgattcgatcattcgtacagaatctatgcttgaatttgatatgtgctttcatcttgaatattctcctgatgttgttagctttgaatctcaacctcaaggctttcattacgaatatcaaggaaaacgcctcccctatactccagattttctcattacacattcatctggacagcaacaattactcgaggttaaacctctttctaaaacccaatgtcctgattttcaatcaaaattcatccaaaaacagcaagcagcccagaaattaaatctttcattaatccttattaccgaaaagcaaattagaacaggtcatttactcaacaacttcaaacttctgcatagatatgctggcctacatagtatatcggccactcaaaaatcaatcattaacctcatccagacagtaaataaaattcaaattaatcaaattgcacacaggttaaatatcagtaatggagaggtattagctggtgttttaagttggctatcaaaagggacactgcaaacggtttacacaaatgaaatgattaatggcaactctattgtatcgttaggtttatcaatggatatagaatttccatttactgatgaatttcaaaaaatattaactactcaatcctatccagctgaaatcactaatgataaaaaaacagaagtgcttacgccttctcttgattcatacgatgacgctataaaagcagaagtattgcgtcgtatttcttttcttaggtggataaagcctcgtttaaaaggtggatggacagaaaaaaatttaacacctcttcttaacgatgctgaaattgatttaaaagtgagcgcaccaaaatggcgaacccttgctgaatggcataagaattatcacaaaagtggggaaaaggtatcctctttaattccaaagcactcacataaaggtaataaaaatatgaatactgatagcgattttttgataacaaaagcaattaacgaaaaatatttaacactaaaccgatgctctatcagtcaaacttttaagtactattgtgatttagtaataattgaaaatcgctctatacctacaaagaaaataaaactggtcagtcaacgtactttttataaccgaatcaatgcactacctaaatatgatgtcgctttaaagcgttacggaaaacgatatgctgatattaattaccgcaccgtagataaaatgataacagcaacaaggcctttagaacgagtagaaatagaccacacgcctcttgacttaatcttgctcgatgacactttagagataccattaggtcgcccatacttaacaattttaatagatagctatagtaaatgcatcgtgggctacaatcttagcttcaggcctcctagctttgaatctattcgccatgctttttgtaatgcatgccttgataaatctttaattacacagcaatatcctcaccttcaacacgattggcctgttgcaggaaaaattgaaaatcttgttgttgataatggcgctgagttctggagtaatagcttagaagatagtttactgccttttgctaccaatattttatataacaaggttggtgaaccgtggatgaaacctcttgttgaaaagttttttgacctgttaaataaaggcttagtccattccctcccaggaacaactcgctcaagaatagagcaactgaaaggttataatcctaaaaaagatgcagcgattacattcagtttatttttagaactatttcatacgtggattatcgacatctatcacatgacttccgatacaagagagactgctgttccttattttaaatggcaagaaggagtaacggctttaccccctctcacctatacagatgaagaggctcaacaattacgaatagagcttggaatattaaatactcgaacggttcgtcttggaggtatttttcttcatggattacgttatgaatcagaagagttaagtgaatacagaaaaatttggggggctattgataagaataacctaacgctgaaaacaaaaaccgacccttcagatatatcacatatttttgtctatttaactaatgaatcacgctatattaaagttccttgcataacagatattagttatacatccggacttacgttatttcagcatcaaaccgctcaaaaattgcaaagaactaaaacaagattacaaatagatcatgaaaaactcgctgattcacgtatgtatgttgaaaatagaattgcggaagaagtggagaaaatcaaatctaataaaaaacgtactgcgaaaactacccatgcatcaaagatcgctcgacaccaagatattggtagtcatactcaaaagtcgattcaagtacctaatgagcaaagtgaaatcaaaaaactgaataaaaatgaacatgatgttttaaatggatgggatgaacaacatgatgatttagagggattctgatgcacactttatcttcgactcaaaaagagcaactcatcagctttaatcaatgctttattgagtatccaataattactcatatctactctatttttaatgatttacgaatgaatcaaggtttaggtgcagaaccacaatgtatgctcttacttggtgatactggctcaggaaaatcagcactcattaataactatctgttacgacaaccgccatcaaatttttccgcactcagttcattacccgttttacatacacgtatcccacgtagagtgaataacgaacaaaccatgtatcaactgttaactgacttaggacaatcaccttcaggatcgagacgtgcaaaacgctcagaaatcgctctcgccgaaggagtcgttcgagctttaaagcgtaaaaaaacagaactcattattattaatgagttccaagaactcatcgaattttcaagtgctaaagaacgtcagaatgtcgctaacacgcttaaatacattagtgaagaagctagagtatctattgtgttagttggtatgccctatgcagatattattgctgaggagcctcaatggggatctcgcttaacatggaaaacacaaatcgaatatttttcattaaaaaatgacatgaaaacctatgttcaattcctaaaaggcctagcaaatcgaatgggatatgatgaggtgccatcattgcatagcaaggagcttgctattccactgttttcaatttgtaggggtgagctaaggcaacttaaaaacttctgctctgatgcgatgctagagagctttaagcaaaacaaaaacacactaactcatgatgtattaagtgccactttcaagtacaaattcccaacgaagaaaaatccatttgaaatgaatgtagctgacgttccaattcaagaggtagagtcttattcaaagtataatctaaacgcaatgactgatgatgaacgtcttactgcaactaagtttcttgatgctatgtctttatcttcactgttgagtaagacttgacctaggctgctgccaccgctgagcaataactagcataaccccttggggcctctaaacgggtcttgaggggttttttgctgaaacctcaggcatttgagaagcacacggtcacactgcttccggtagtcaataacgaggaagcggaagagcgatgtggctggggcttccacccaactgatgcttgcaaaattactctgcataaattgcaaagaagtctacaaatttgcaaaataagcctgcataaactacctttagttgtaagtttacaacatagaggtgaatatcatgtacgttcgtacactaaaacaatctcaagtaaaaaacattagcaaatttatgagcctgaagaatgattcgatcattcgtacagaatctatgcttgaatttgatatgtgctttcatcttgaatattctcctgatgttgtacgcccctatccattttagcggatccatggagaaaaaaatcactggatataccaccgttgatatatcccaatggcatcgtaaagaacattttgaggcatttcagtcagttgctcaatgtacctataaccagaccgttcagctggatattacggcctttttaaagaccgtaaagaaaaataagcacaagttttatccggcctttattcacattcttgcccgcctgatgaatgctcatccggagttccgtatggcaatgaaagacggtgagctggtgatatgggatagtgttcacccttgttacaccgttttccatgagcaaactgaaacgttttcatcgctctggagtgaataccacgacgatttccggcagtttctacacatatattcgcaagatgtggcgtgttacggtgaaaacctggcctatttccctaaagggtttattgagaatatgtttttcgtctcagccaatccctgggtgagtttcaccagttttgatttaaacgtggccaatatggacaacttcttcgcccccgttttcactatgggcaaatattatacgcaaggcgacaaggtgctgatgccgctggcgattcaggttcatcatgccgtttgtgatggcttccatgtcggcagaatgcttaatgaattacaacagtactgcgatgagtggcagggcggggcgtaatttttttaaggcagttattggtgccctggtaccgagacgggtttaaggaggaagattttatgatacaaaagttatctgtatttatctaatttaagtggctactctaagaaggttctgtccaaaaaaaagttacatttattaataacacatgaaattaaattacatactaaaattacagtcatattttaaggtaaaacattttgcagactatcactgcaaaaccatgtgatcttatgttgcaaattcaaaactaagcttttgatttttatatgagagctatgcaagcttatgttgcaagcatcaccaactgatgcttgcaaaatcactcgacgtcaggtggcacttttcaaaccagcaatagacataagcggctatttaacgaccctgccctgaaccgacgaccgggtcatcgtggccggatcttgcggcccctcggcttgaacgaattgttagacattatttgccgactaccttggtgatctcgcctttcacgtagtggacaaattcttccaactgatctgcgcgcgaggccaagcgatcttcttcttgtccaagataagcctgtctagcttcaagtatgacgggctgatactgggccggcaggcgctccattgcccagtcggcagcgacatccttcggcgcgattttgccggttactgcgctgtaccaaatgcgggacaacgtaagcactacatttcgctcatcgccagcccagtcgggcggcgagttccatagcgttaaggtttcatttagcgcctcaaatagatcctgttcaggaaccggatcaaagagttcctccgccgctggacctaccaaggcaacgctatgttctcttgcttttgtcagcaagatagccagatcaatgtcgatcgtggctggctcgaagatacctgcaagaatgtcattgcgctgccattctccaaattgcagttcgcgcttagctggataacgccacggaatgatgtcgtcgtgcacaacaatggtgacttctacagcgcggagaatctcgctctctccaggggaagccgaagtttccaaaaggtcgttgatcaaagctcgccgcgttgtttcatcaagccttacggtcaccgtaaccagcaaatcaatatcactgtgtggcttcaggccgccatccactgcggagccgtacaaatgtacggccagcaacgtcggttcgagatggcgctcgatgacgccaactacctctgatagttgagtcgatacttcggcgatcaccgcttccctcatactcttcctttttcaatattattgaagcatttatcagggttattgtctcatgagcggatacatatttgaatgtatttagaaaaataaacaaatagctagctcactcggtcgctacgctccgggcgtgagactgcggcgggcgctgcggacacatacaaagttacccacagattccgtggataagcaggggactaacatgtgaggcaaaacagcagggccgcgccggtggcgtttttccataggctccgccctcctgccagagttcacataaacagacgcttttccggtgcatctgtgggagccgtgaggctcaaccatgaatctgacagtacgggcgaaacccgacaggacttaaagatccccaccgtttccggcgggtcgctccctcttgcgctctcctgttccgaccctgccgtttaccggatacctgttccgcctttctcccttacgggaagtgtggcgctttctcatagctcacacactggtatctcggctcggtgtaggtcgttcgctccaagctgggctgtaagcaagaactccccgttcagcccgactgctgcgccttatccggtaactgttcacttgagtccaacccggaaaagcacggtaaaacgccactggcagcagccattggtaactgggagttcgcagaggatttgtttagctaaacacgcggttgctcttgaagtgtgcgccaaagtccggctacactggaaggacagatttggttgctgtgctctgcgaaagccagttaccacggttaagcagttccccaactgacttaaccttcgatcaaaccacctccccaggtggttttttcgtttacagggcaaaagattacgcgcagaaaaaaaggatctcaagaagatcctttgatcttttctactgaaccgctctagatttcagtgcaatttatctcttcaaatgtagcacctgaagtcagccccatacgatataagttgtaattctcatgttagtcatgccccgcgcccaccggaaggagctgactgggttgaaggctctcaagggcatcggtcgagatcccggtgcctaatgagtgagctaacttacattaattgcgttgcgctcactgcccgctttccagtcgggaaacctgtcgtgccagctgcattaatgaatcggccaacgcgcggggagaggcggtttgcgtattgggcgccagggtggtttttcttttcaccagtgagacgggcaacagctgattgcccttcaccgcctggccctgagagagttgcagcaagcggtccacgctggtttgccccagcaggcgaaaatcctgtttgatggtggttaacggcgggatataacatgagctgtcttcggtatcgtcgtatcccactaccgagatgtccgcaccaacgcgcagcccggactcggtaatggcgcgcattgcgcccagcgccatctgatcgttggcaaccagcatcgcagtgggaacgatgccctcattcagcatttgcatggtttgttgaaaaccggacatggcactccagtcgccttcccgttccgctatcggctgaatttgattgcgagtgagatatttatgccagccagccagacgcagacgcgccgagacagaacttaatgggcccgctaacagcgcgatttgctggtgacccaatgcgaccagatgctccacgcccagtcgcgtaccgtcttcatgggagaaaataatactgttgatgggtgtctggtcagagacatcaagaaataacgccggaacattagtgcaggcagcttccacagcaatggcatcctggtcatccagcggatagttaatgatcagcccactgacgcgttgcgcgagaagattgtgcaccgccgctttacaggcttcgacgccgcttcgttctaccatcgacaccaccacgctggcacccagttgatcggcgcgagatttaatcgccgcgacaatttgcgacggcgcgtgcagggccagactggaggtggcaacgccaatcagcaacgactgtttgcccgccagttgttgtgccacgcggttgggaatgtaattcagctccgccatcgccgcttccactttttcccgcgttttcgcaga

SEQ ID NO: 5202 - DNA, 13187 bp, synthetic construct
  source 1..13187: mol_type = other DNA
aacgtggctggcctggttcaccacgcgggaaacggtctgataagagacaccggcatactctgcgacatcgtataacgttactggtttcacattcaccaccctgaattgactctcttccgggcgctatcatgccataccgcgaaaggttttgcgccattcgatggtgtccgggatctcgacgctctcccttatgcgactcctgcattaggaaattaatacgactcactataggggaattgtgagcggataacaattcccctgtagaaataattttgtttaactttaataaggagatataccatgggtgaactgccgagtaggcagctgaagttagtacagcgcggctgaaatcatcattaaagcgtttaactgccgaaaaggcagaggctaaatagcgaattccgagcgaaggagatatacatatgcattttttagttcaaacaaaactttatcctgatgaggctcttgaaagctatttgctaaggcttgctagggataactcatacgatggctatagtgagcttgctgatattttatggcaatggcttgtagagcaagatcatgatcttgaaggtgcgttgccgttagagctgggtaaagttgatgtttatcatgctaggcaagcgagtagctttagaataagagcgctcaagttggtagctcaattagctgatgtaaacgctggtaatattcttgcgcttgcatggcggcgcagtaattttaaatttggcaacttagtagcagtaagccgtaatgagcagacaattcctcttgagttacttcgcactgataatatacctgtttgcattgaatgcttgtttgaatcttcttacgttccttttcattggcatttaaagccctataagacgtgccataagcataaatcacaattaactacacattgtaaggaatgccataacttaattgattacagagcttctgaggagtttttagagtgcagttgtggttgtaaactaaccaatagtgaacagttaaacgatgcagactttaaaattgcatttgcgcttgcaagtagtaacagccataaaatagtggggttaatatcttggtttgcgaaggttaagcaacttgatgtaagcgatgctgactttaaccgtacttttgttgattactttagtacttggcctgaaagccttactactgaattagatttactcacaaacaatgcgcgcctcaagcaacttaacccttttaataaaactaagttcaactctgtttatggaaatgtgatccgtgatggtcaaatagctgcaacaagtaaccgtaaaaacaaagtacttgatgaactaattaaatattttgttgaattagttgatagtaatcctaaaactaaacatccaaatattgcagatttactgctttgtacttttgataccgcagtattattaaacaccaccacagagcaagtttataggcttcatcaagaaggctttttaaactgcgcttacccacaaaaaaagcacgaacagctcagagctgatagtcatgttttttatttacgccaagtgattgagctacagcaagcattcgcagctgaaacgcctcaaacaaaaaaacaatttatagcgccgtggtaacttatgaacttacaagatgcatttgcgattgaatcacttaaggaaaaaaccacagcacttagaaagttgtttactccatatatgtctcatgttgcggtagatggctttgaagaacaagcgctgactgtgctcattaacctagtttataaacgaagtgagattgatgatttaacaagtacaagaaccgctaaaagtgtattacgtgatgaagtgttactgagtaaatgtattaacgaagttaaatggtttcatactcataatttaaaatatcctgatatacgcgtaagccatcaacgtttaattagtaaggtagtaagtgaagatattgcgggtatttgtagccggtcattacctttaagttttggatggtcgcacaacagtgctgaaattaatcatgcaaagttatttttaacctcatttacttggcaaggtgaagtaacttgtttagcaaatttactaataaatgaggagcctgtttggattaatttaataaggacatacgggtttactaaaaaggcggttttaggcatcgcgggtaaaataaaacagcttttgccagtggcagaactcccattagaagtaagctctttttcaccacaattacaaatgccatttcagcaaagctaccttgcggttacgcctgtagtaagtcacgcaatgctggctaaaattcagcaattaacaacagatcgtaagttaaattttggtttagttgagcactcaagacctgccaatgttggcgatttagcaagctcagtaggtggtaatattagagtgctgcgttactttcctaaaacatattcaaaggctgttaactgctctgaagtattcaataatgatagtgagaaagcatttaaaattcgtgcgctattaaacagtcaatttcaacaggcgcttttggtattggtcggtattaaacagtttaatacgttaaggcaaaagcgattagcgcgagtagcggctattaggcaagtacgtgttagcttgcagttgtggctggataacattctggaagctaaaaataacgctcaagggcaagcctaccctgagtgggcaaagcattacttagatcagagtattactaactgcattagccaatttagtaacgtactaaatgagagccttggtaatttaagtaagctcaaacgctttgcgtatcaccctaatttaatgggggtgtttaaaacgcagttaaactatgtgtttactcactgtattcctgatgaagaaacattaaatgatgagcaaatagtgtatgtgcattgccaagatatgcgagtgtttgatgctgaggcaatggctaatccgtatattcaaggtatgccgtcacttacagctttaaatgggcttgctcataactttgagcgtaagctaaaaaattttatagacccttcaattaagtgtattggtagtgccattaacattgaaagttatcaactacatacaggtaaaccattacctgaaccaagtaagttaaaacaagttgctggccgtagtcatgtcataagatcaggaattatcgataaacctaaatgcgatataacactcgatttagtctttaggctttttgtaccaaacattaagctgttagataagttaaatagtcagcttgtgaaacccgcactaccatctatgtttgcaggcgggactatgcatccaccttcgttataccaaaatattgactggtgccatttacatactaaaccaagtgagctgtttaaaaatataaaggcaaaatcgttaaatggcagttggttgtacccttcaaaaaaagtagtcaaaagttttgaacagttgattgatgcgcttaacggtaactttaatttaagacctgctgccattggttttgctgcgcttgaagaacccataaagcgagatgtagccttacatgaataccattgttatgctgagcccgtaattgggcttttagagtgtgttagcaatacatcagttaagtacgcaggggctaagcagttcttccatgacgcattttgggttatggatgttcaaaaagagtctatgcttatgaaaaagtctaagtttgagtatgaataatgcaattacctcggcatttaagttacacgcgttcgctttcacccagtaaagcggtatttttttataaaacatcggagtctgattttgaaccgctgcaaatagagcaaaataagcttgttgggcaaaagtcagggtttggcgatgcgtatcaaaagcaaaatgtggctaaaaatttagcgccacaagatctagcgtttggaaacccacaaacgattgatgtgtgctacgtacctccagcagtaaatgagctattttgccgtttttcactcagggttgaggctaatagcaatgaaccacacgtttgtgatgaccctaaagttatttattggttaaaacggttttttgaaacctacaaaaaacacaatggtcttaatgaagttgcaactcgctatgctaaaaatatactgatggggaactggctttggcgtaaccgccaatcaccaaatgttgatattgaaatccttactgaacatgcagccccgatcattgttgaaggtgcacaaaaactaaaatggcaaggcaactggcaaaacaatcaaacagcattaataacattatcagaagctattcaagaagggcttagcaatcctcaaaattattgttatttagatataaccgcaaaaattaaaaatgcatttagccaagaggttcaccctagtcaaaagtttgtagacaatgttgaacaaggcatgtcatctaaacaacttgcatacactcaagtcggcgataaaaaagcagccagtttaaactcacaaaaagtaggggctgcgattcaaactattgatgattggtatgagggaggttacaaacctttacgcactcacgagtatggtgcagataagcaaatattagttgcacatagaacgcctaagagccattcagacttttattcattacttccgcgcattgccttgcatattaagcacatggaaaagcatggtttagagcaaagtgaagaatcaaacgcagttcactttattgcagcagtgttgatcaaaggcggcttgttccaaaggagtaaggcatgaagcgctattattttactattacttatttacctaaaaattgtgatgtaagcctccttgcagggcgttgtatcggcatattgcatgggtttatgagttcgcgtgaaattagtaatataggtgtgtgttttcctaaatggaatgagcaagagataggtaatgaattggcgtttgtatcgacagataaaaagcaattaaccaatctatctcagcaaagctattttgagatgatggctcaggataaattatttggcttatcaaaaatactcgaagtaccaacaaaccaaaatgaggttatgtttattcgcaaccaatcagtagctaaggcttttgttggcgaaaagcaaagacgtttaaaacgcgctaaaaaacgagctgaagccagaggtgaagtttataatcctgaatatcaatttgaggcaaaagacataggccattttcattcaatacctgtatcaagcaaagccaacggccaaagttatgttctgcatatacaaaaaattgaaaatactaatgcgacagaaaatcaatttaataattatggctttgctacaaatcaaacatttcaaggtacggttccttctttgaatacccaataacctttaataaggagatatagcatgtacagaagaaaactcaaacactcccgtgttaaaaaccttcataaatttgctagtcaaaaaaataaatctacctgtttagttgaatcctctttagagtttgatgcctgttttcattttgaattttcaccatcaatagccgcatttgaggcacaaccactaggttatgaatatgagtttgataaccgtatttgccgttacacacctgactttttacttacccacacagacggcacgcaaaaatttatagaagtaaaaccgcaaagcaaaattgctgacgaggactttcgtgcacgttttattgaaaagcaaaccatcgctaaacaagatggacgcgacttaatactggttactgataaacaaatccgtgtatacccaacactcaataacttaaaacttttacatcgctattctggttttcagtctttaacagagctgcaagcatcggtgctcgagcttgttaagcaatacggctctattaaagtgggccagttagttaactttttaaaagtaactgccggtgagctacttgctactgtgctacgcttattatcactagggcagttatttgccgacttaactacaaatgaaatatcaatagaaacagcaatttggtctaacaatgtttaatgacggtttgtttgatgatgagtttaaccagccattaccaaaagtagaaaccaaactacctcaaaattacgccaaagatttacaagcccttcctgaaaaaattaaaaatacaacatttgctaaacttaaatatattcaatggcttgaggctaatattcaaggtggctggacacaaaaaaaccttgagcctttattgaaagtaatgcctgaagttgagggtgaaaaaaagcctagctggagaacagctgcacgatggtatagcgcttatacaaatgcagataaaaatatcatggcgctaataccaagccatcaaaaaaagggtaacagggagcgcgatacagccaccgataagttttttgaaaaagcacttgagcgttacttagtaaaagaaaagccatcagtggcttctgcttacaagtattacgcagacttagttatcattgaaaacgacagcgttgtgggcagtgttttaaagcctttaacatacaaagcgtttaaaaatagaatcgataatttaccgcaatacgacgtgatggtttctcgctatggtaagcgtcttgctgatattgcttttaataaagtagaagggcatacacggcctacccgagtactcgaaaaagttgaaattgaccatacaccgcttgatcttattttattagatgatgagctacatatcccgcttggtaggccaacacttaccatgttagtcgatgtgtatagccattgtattgttggcttctactttagcttcagcgagcctagctatgatgcagtaaggcgagcaatgctaaatgcaatgaaacctaaaagtgatgtggcaaaactatacccagatacgataaatgagtggaaatgtgctggcaaaattgaaactctcgttgttgataatggcgctgaattttggagtaacagccttgaacttgcttgtgaagaaattggtattaatactcaatataaccctgttgcaaagccgtggttaaaaccctttgtagaacgtatgtttggcacaattaacactgaattattagaccctgttcctggtaaaaccttttctaacattttacaaaagcatgaatacaatcccaaaaaagatgcaatcatgcgctttacaacctttatgcagctattccataaatgggtagtagacgtttaccatcaagatgccgatagccgctttaagtacatacctagccaactatgggagcaaggctttaatacgttaccgccaacagtgctgagtaatgctgatcttcaacaattagatgttgtgctcagtatttcaaaccatagggtgcttcgtaaaggtggaatacggctagaaaatttaagctacgacagtactgaactagccaactatagaaaacagtttagccataaagtatctcaagaagttttaattaaattaaaccccgatgatatttcttatatatatgtttacctcgataagctagagcattacataaaagtgccatgcatagatccaaacggttacacccaaaatttaagtttgaatcagcataaaataaatatacgtattcatcgcgattttatttccggatctatcgataatgtaggcttagcaaaagcgcgtatgtttattcataataaaattcaaaacgagtttgaagagttaaaaaatgcaccaaaacactcaaaagtaaaagggggtaaagcattagctaagcatcaaaatgtaagtagtgactcacaaaaatcaatagctcagagcgagccattagaacccaaaaaggttacacctaaagagcaaccaacagatagctgggatgactttatttcagacctagatggattttaattatgctgaccgataaacaaaaagcaaaacttaatgaatttcgcgatgtatttattgaatacccaataataactactgtatttaacgactttgacagattaagacttggtaaaggattagcgggcgaaaagccctgcatgctgttaaatggcgatacaggcacaggtaaaacagcactaataaaacagtataaagaacgccatttaccgcaatttattaatggagtgatgaaccaccctgtattagtaagccgcatacctagtaacccgacactagaatctactttagccgagcttcttaaagacttagggcaagtaggtagtacagagcgcaagctgagaataaacggtacgcggttaacgacatcattaataaaatgcctaaaaacgtgtggcacagagcttataattattgatgagtttcaagagctgattgagcacaaccaaggtaaaaagcgccgcgagattgctaatcgattaaaatacattaacgatgaagcgggtgtatcgattgtattggtgggtatgccgtgggcagaaaaaatagcagacgaaccccagtggtcatcgcgtttattagtaaggcggcagctgccttattttaaattatcagaaaacccaaagcattttgtacagttaataattggcctagctaaccgtatgccattcaccgaaaagccaaaattaagtgagcaagcaacagtatttgctttgttctcattgtcaaaaggctgttttagaactcttaaatactttttagatgatgccgtactttatgcattaatggataacgcgaaaaccctcacaaccaagcatctagttaaagcatttggagtactgtttcctgatgtaccaaacctatttaccttgcccgttgcagaaattacagcaagtgaagttgagcgctattcactttataaacttgaaagcgcccaagatgaagatccgtttatagcgactaagtttactgaccaaatgccgattagtcagttgttgaggaagtaacctaggctgctgccaccgctgagcaataactagcataaccccttggggcctctaaacgggtcttgaggggttttttgctgaaacctcaggcatttgagaagcacacggtcacactgcttccggtagtcataaacgaggaagcggaagagcactgccacccaaattcctcatttggtgttgtttgaagtataagttgacatatttgtactaaaagatggcataaattggaagtataaggtggcatagtctagtatttaaccaaatggttagatggttgactcacatgtacagaagaaaactcaaacactcccgtgttaaaaaccttcataaatttgctagtcaaaaaaataaatctacctgtttagttgaatcctctttagagtttgatgcctgttttcattttgaattttcaccatcaatagccgattagacggacgcaatcttgggatccatggagaaaaaaatcactggatataccaccgttgatatatcccaatggcatcgtaaagaacattttgaggcatttcagtcagttgctcaatgtacctataaccagaccgttcagctggatattacggcctttttaaagaccgtaaagaaaaataagcacaagttttatccggcctttattcacattcttgcccgcctgatgaatgctcatccggagttccgtatggcaatgaaagacggtgagctggtgatatgggatagtgttcacccttgttacaccgttttccatgagcaaactgaaacgttttcatcgctctggagtgaataccacgacgatttccggcagtttctacacatatattcgcaagatgtggcgtgttacggtgaaaacctggcctatttccctaaagggtttattgagaatatgtttttcgtctcagccaatccctgggtgagtttcaccagttttgatttaaacgtggccaatatggacaacttcttcgcccccgttttcactatgggcaaatattatacgcaaggcgacaaggtgctgatgccgctggcgattcaggttcatcatgccgtttgtgatggcttccatgtcggcagaatgcttaatgaattacaacagtactgcgatgagtggcagggcggggcgtaatttttttaaggcagttattggtgccctggtaccggtagctcggctgtgaatgaaatggacttaccaattaaagtaaaaggtgatgatttattcatcaaagtttttgtgccagtgtaaaccattttccaaactgtttaagagtgatttacaacgcgtagcatgtttactttgcgttttataaagctgtatttggtagctttatgccatctattgcttcaatactatgccaatatacacttcacttaccacgctgtaagttaataaaaccgagtttggttatgtcaacttatacttcaaacaacatttgggtgaaaatacattcctttttgacgtcaggtggcacttttcaaaccagcaatagacataagcggctatttaacgaccctgccctgaaccgacgaccgggtcatcgtggccggatcttgcggcccctcggcttgaacgaattgttagacattatttgccgactaccttggtgatctcgcctttcacgtagtggacaaattcttccaactgatctgcgcgcgaggccaagcgatcttcttcttgtccaagataagcctgtctagcttcaagtatgacgggctgatactgggccggcaggcgctccattgcccagtcggcagcgacatccttcggcgcgattttgccggttactgcgctgtaccaaatgcgggacaacgtaagcactacatttcgctcatcgccagcccagtcgggcggcgagttccatagcgttaaggtttcatttagcgcctcaaatagatcctgttcaggaaccggatcaaagagttcctccgccgctggacctaccaaggcaacgctatgttctcttgcttttgtcagcaagatagccagatcaatgtcgatcgtggctggctcgaagatacctgcaagaatgtcattgcgctgccattctccaaattgcagttcgcgcttagctggataacgccacggaatgatgtcgtcgtgcacaacaatggtgacttctacagcgcggagaatctcgctctctccaggggaagccgaagtttccaaaaggtcgttgatcaaagctcgccgcgttgtttcatcaagccttacggtcaccgtaaccagcaaatcaatatcactgtgtggcttcaggccgccatccactgcggagccgtacaaatgtacggccagcaacgtcggttcgagatggcgctcgatgacgccaactacctctgatagttgagtcgatacttcggcgatcaccgcttccctcatactcttcctttttcaatattattgaagcatttatcagggttattgtctcatgagcggatacatatttgaatgtatttagaaaaataaacaaatagctagctcactcggtcgctacgctccgggcgtgagactgcggcgggcgctgcggacacatacaaagttacccacagattccgtggataagcaggggactaacatgtgaggcaaaacagcagggccgcgccggtggcgtttttccataggctccgccctcctgccagagttcacataaacagacgcttttccggtgcatctgtgggagccgtgaggctcaaccatgaatctgacagtacgggcgaaacccgacaggacttaaagatccccaccgtttccggcgggtcgctccctcttgcgctctcctgttccgaccctgccgtttaccggatacctgttccgcctttctcccttacgggaagtgtggcgctttctcatagctcacacactggtatctcggctcggtgtaggtcgttcgctccaagctgggctgtaagcaagaactccccgttcagcccgactgctgcgccttatccggtaactgttcacttgagtccaacccggaaaagcacggtaaaacgccactggcagcagccattggtaactgggagttcgcagaggatttgtttagctaaacacgcggttgctcttgaagtgtgcgccaaagtccggctacactggaaggacagatttggttgctgtgctctgcgaaagccagttaccacggttaagcagttccccaactgacttaaccttcgatcaaaccacctccccaggtggttttttcgtttacagggcaaaagattacgcgcagaaaaaaaggatctcaagaagatcctttgatcttttctactgaaccgctctagatttcagtgcaatttatctcttcaaatgtagcacctgaagtcagccccatacgatataagttgtaattctcatgttagtcatgccccgcgcccaccggaaggagctgactgggttgaaggctctcaagggcatcggtcgagatcccggtgcctaatgagtgagctaacttacattaattgcgttgcgctcactgcccgctttccagtcgggaaacctgtcgtgccagctgcattaatgaatcggccaacgcgcggggagaggcggtttgcgtattgggcgccagggtggtttttcttttcaccagtgagacgggcaacagctgattgcccttcaccgcctggccctgagagagttgcagcaagcggtccacgctggtttgccccagcaggcgaaaatcctgtttgatggtggttaacggcgggatataacatgagctgtcttcggtatcgtcgtatcccactaccgagatgtccgcaccaacgcgcagcccggactcggtaatggcgcgcattgcgcccagcgccatctgatcgttggcaaccagcatcgcagtgggaacgatgccctcattcagcatttgcatggtttgttgaaaaccggacatggcactccagtcgccttcccgttccgctatcggctgaatttgattgcgagtgagatatttatgccagccagccagacgcagacgcgccgagacagaacttaatgggcccgctaacagcgcgatttgctggtgacccaatgcgaccagatgctccacgcccagtcgcgtaccgtcttcatgggagaaaataatactgttgatgggtgtctggtcagagacatcaagaaataacgccggaacattagtgcaggcagcttccacagcaatggcatcctggtcatccagcggatagttaatgatcagcccactgacgcgttgcgcgagaagattgtgcaccgccgctttacaggcttcgacgccgcttcgttctaccatcgacaccaccacgctggcacccagttgatcggcgcgagatttaatcgccgcgacaatttgcgacggcgcgtgcagggccagactggaggtggcaacgccaatcagcaacgactgtttgcccgccagttgttgtgccacgcggttgggaatgtaattcagctccgccatcgccgcttccactttttcccgcgttttcgcaga

SEQ ID NO: 5203 - DNA, 13359 bp, synthetic construct
  source 1..13359: mol_type = other DNA
aacgtggctggcctggttcaccacgcgggaaacggtctgataagagacaccggcatactctgcgacatcgtataacgttactggtttcacattcaccaccctgaattgactctcttccgggcgctatcatgccataccgcgaaaggttttgcgccattcgatggtgtccgggatctcgacgctctcccttatgcgactcctgcattaggaaattaatacgactcactataggggaattgtgagcggataacaattcccctgtagaaataattttgtttaactttaataaggagatataccatgggtgttccgccgcataggcggttaaaaatagtacagcgcggctgaaatcatcattaaagcgtgtatccgctgggctagcggtaaactaatagcgaattccgagcgaaggagatattcatatggatacggacatcgaagtttactctgatgaatctctcgaaagttttttactacgcttgagtaagtttcaaggctacgagcggtttgctcatttcgctgaggacatttggcaaactacgttattgcaacatgaggctattcccggcgcatttcctttcgagttaagtcgaatcaacatctataaagctcaaacaacgagccaaatgcgagttcgagtacttatagatttggaaaagcggctgaaatttaacgactttggcgttctacggctatcgcttgctcattctaaagcaagtttctctccagattataaagcggtaaatcgctatggtgctgattatcctcaagcctttcttagaaaaaacttcacacctgtttgccctaaatgcctagacgaagctgcttatattcgtcagttgtggcatttcattccctaccaagtttgccataaacaccacagccaactcgctcaacgatgccccgaatgcggaaaattattgaactaccaatcgtcagagctaatagagaattgtgaatgtggtttttccttacttaatggcgaatcagagaaggaaagctgttctactttatttgttgcacagtggctggcaggggagaaacccgtagaatcaggattaatgagtcaggaactcactcaatcaagtcggtttggatttctgctttggtatatcaaccgatatggtgaacttgatgatattagttttgatggctttgttgagtgttgtaaatcttggccgaacaagctcaataccgatttagattctattgtgcagaaggctgacatagtgcgaatccagccttggaacaaaatctacttcagtgaagtgtttggtgacttgttgaaagagtgtcgcagcctaccaagccgtgatcttagtaaaaatccggtgctgaaaaatgtagttctatatttcagagctttaatcaccaataatcctaaagtgaaatcagcaaacataggtgatgtattattaagccctttagaggcttctacattgctttcatgtaccacagacgaaatatatcgcctgtaccagtttggacagcttaaagctcaacacacgcccaagttgcagagtaaaatagaaaaccatcactctgttttcactcttcgtagcattatcgaactcaagttatccagtatgtgtagtgaaactgatggtttaaatcattatttgccagagtggtaagctatgacaactttgcaagatttaatcgatattgaggactctaagctccgatttatagagataaaaaaagcgtttatgccgtatacacgaccagtagaagttgatgggagtgaaaaacaggcattaattgttttactcaatctttcattgagtaaaccggaagtgaaagactggctcgattttcctcgcgctttggactatttcgccgattcagataacttatcggcggctgaacaagaaattcagtggtttcatacccataaccttaagttcccagattgccgagtatcagagcagcgaatcatagctacacctctgtacactgagactcctacactcacgagtcagtcattaaacagagcttatggctgggcgcacaattccgctgtttataaacatactatctggttattaaatgagttccggtggcgtggaagagtggaaaatctgcttaatcttatttgtggtggtgatgatttttggctggaacttttagctgatatgggattaaaacctaaagcacaaatacagcttaaagatctaattgaacatcagttaccgttgactcattttcccgacgaagtgaaccgctacagcaagcagctccgtttcccttggaggggggattacctatcagtaacccctgtggttagccatgctatacagcagcaactctctgttttgtctcgtcaaggtgaatgttctcttcgctttaaaacaatgacctatccaaattcagctagtattggaaatttatgtggttcactgggaggatatataaatgtactcaattatccgattgacgtaattgcgaatcgacatcaaacactcggtgcaagccgcagtagaaccaagcgctactttgatgattttcagttaacgtcaaaaagtacctgtagtgtattggctcatctgacaggttttgaacaacctcaaatgcgcaaagcgcagaaacacgttcgccagtatcaactgaaaattatacgtaaacaaatcgctttatggttactcccgcttattgaattacgggataattcagtcactgatccgattggcttttatgatgaaccagatgatgaactggcgaagcgattcttgaccatcaatgagcttgattttatagaactcacaaccagcttaaatcagcgcttgaatatagctttacagaacaaccgctttgcttctcgttttgcctaccatcccaaactgatgcgtgtgttaaaaacagagcttatttgggtgctaactcagctaagtcaacctgaaccagaacctcctactgtttctgatagtaaagtgcagtatctttacctttcatctatgagagtatttgatgctgctgcaatgagttgcccgtacttatctggtgcgccttcattaacggcggtgtggggatttgttcatcgttaccagagagagctacaagatttgctatctgatggagaagggcaattcgagtttaaagattttgctttttttattcgtgatgaatccgtacaaaccagcgcaaagctcaccgaacccagtgtaatagcaaaagctcggagtatttcacaagttaagcgaaccacgatcattcgtgaagattgctcggatttaatattcgatattgtaattgcaatagaaagtgaccaacgaatttcagattaccaaagccagtttaaagctgcattaccaactaatttcgctggaggggccttgtttcaacccgagattaattcagggattaattggttaagaacctttgtaagtaagtcagaattgttccaagcggtgaaaggtttaccgggctatggtacttggttgtcaccagattcttttcaacctcaaaatctggctgagttacaagagtgtttaacgattgatagttcgctaattcctgtatcaaatggctttcattttctagggtcgccacaggaacggaagggggcattgacgaagcttcattgttatgcggaaaacaacattgctttagctaaacgaaccaatccaatagaagtaagatttgccggtagtgatcacttttttgagcaggtgttttggtcgctggaagtgacagagcagactatccttataaaaaacaaaaggatttagccgcctatggaactctgtagtcagttaaattatgttcgctcgttatcacctggcagagcatatttttattatcttgatgaagataataagatgcgtccacttcagatagacaggactcatttacgagcacccaaaagtggctattcagaggctttctcgggtaatttcaaatctaaaaatatagctccgcaagatctttcctattcaaacccacaattcattgaagagtgttacgtgccgcccggagtaaatgacatctattgtgctttctcgttaagagttcgagcgaactcattatcaccagaagtatgtgttgataatgaggttcgagacatactctgtaattttgcggcactgtataaagaattaggaggttatcgggagctggcaaggcgttatgccaaaaatattttgatgggtacgtgggtttggcgtaaccgagagtgcagaaatataagggttgaagttaaaacagaagataaagagtgggtaattactgacgcaaggtttttagattggtatggctcgtgggagaaggattcacaattagccttagatgaatttactgactatttgtctcaagcattgtctgatagaacctgctatttcaatatggatattaaagcgaagctcactgtaggttggggcgatgaggtttacccaagccaagagttcttagatgtgaaagaagcaggaaagccaagcaaactgttggcaaaagtaaccgtcaatggcgaagagtcagcagcctttcattcgcagaaagtgggagcggcgattcaacgaatcgatgactggtgggatgaaaatgccgataagccgcttcgcgttaatgaatatggagcagacaaagaatatgcaatagcaaggcgacatagttcacgacaccgggacttctactcattgattgcacacactgaaagctatgttgaattgatgctagaaacgaatctgatctcagatgatgtccactttatcatggcagtactaactaaaggtggagtgttcagcggtgcaagcaagaaaagcaagaaggatgagtaatggaatctcgctattatttttctattcgatatattcctgaacacgttgacaatgaactattggcaggtcggtgtatttctaatatgcatgggtttctttctcacgaacgcaacacgcaattcaaaaatagtgtgggtatttgtttccccctttggaatgaacaaacggtcggtaatgtgattacttttgtctcgactaatgaaagtatcctcactggcctatcataccaaccttacttctctacaatgatgaacgagaacctctttgaaatctcaggtattaggattgttcctgatgacgctaaggacgttcgatttgtattcaataaaacaattcaaaagatattcaatggttctaaaaagcgaagaattaaacgagcgatgaaacgtgctgaagaatttggtcatactttcacacctatatcagttgaagtacgggagtttgagttgttccacgagattcctataaacagcaaatcatcaggacgtgatttcgttctacatatacaacgccaaaatccagtggaagcggaaataggacagggatttaatggctatggttttgcatcaaatcagctatggcgaagaacagtcccacttatcttgttttgacctttaataaggagatatagcatgtacgttcgcaatcttcgtaaaccttcagcaaacaaaaacgtttataagtttgttagtgtaaaaaatggctgcaatatcatgtgcgaaagctcattggaatatgattgttgctactatctcgagtattcggatgatgttgttcgttaccagtcacagccgaaaggataccgttttccttatcaaggtaaagaacatccatacacccctgattttttagtccataagaaagatggaacgtcttatctcctcgaagtaaaaccactatcaaaaacattcagctccgagttccaagatgtatttcgccaaaaacaaatcatggcaagtgaattgggggcacctctattactcgtgacagaccgccaaattcggaacgatgtgcaccttaataatttaaaactcgtacatcgttatagcggttgtatcggaaattctagccatttggaaagtgtttggtcagccgttaatcaatcctcatcgatttgtattaaggcgttatctgcaattttgaatctaaccattggtgaagtttttgcttccgtactacgtcttattggtttaggaaaagccaaaacaaaattggatgttttactggatgaaaattctttaatttcggtggcttaatatgtcttttgggccatttgaagatgagttcggttcaataacaaatgacgttcagcaacaatatgaggcaagccctgaagctaaactatctcggctgaagtattcacctcttgaaaccaccaaggttattgagcgagatctatcttcttttcctgaagaacaaaaactaaaagcgctggaacgttataaattaatctctttgattgctaaggagataaatggtggctggacacctaaaaatcttatcccattgatagataagcatatagaaacacttaatataccgaagcccagtgatcgtacagtaaaacgttggtataaggctttttgtgaaagcgatggtgatattaagagtttggttgatagtcatcacttaaagggaaaccggcagcccagaattgaggacgatgaaccgttttttatagaggctgttgaacgttttttagatgctgttcgtccttcttactctaaggcttatcaggtttactgtgaccgaattgaaattgaaaatagcactatcgtttcaggtaagatagcgaaagtcagctatgaggctttcaagaaacggctcaaaaaactccctccatataccgtcgctctcaagcgtcatggtaaatattacgccgacaaactgtttaactactatgaagcagtcaagatgcctacgcgtatcctggaaagagtagagattgaccatactcctctggatttaatcttgctcgatgatgagctgcttgtgccgttggggagagcctatttaactttattagttgatgtgtttagtggctgtataattggatttcatctcggtttcaaagcaccaagttatactgcggtttcaaaggcaattatccattcagttaaatcaaaggaatacgttaatgaattgccaatcggattgtcgaaccaatggatttgtcatggaaaaatagaaaatcttgttgttgataacggtgctgagttttggtcgaaaagtttagaccaagcatgtattgaggctggtatcaacataatctataacaaagttcgtaagccttggttaaagccctttgttgagagaaaatttggtgaactaattcaaggtattgtgggatgggttcctggcagaacattttccaatgttcttgagaaagaagattatgaccctcaaaaagatgctgtgatgcgttttagtgttttcgttgaagagttacatcgctggattattgatgtgcataacgcttcagcggatagccgacatacgcggatacctaattatcattggcaaaagagtgaagaagtattgccacctcctgctttgactgagcgtgacgagatacaattccgtgtaattatggggatggttcataaaggggcattaaccagtaaagggataaaatttaagcacttaatgtacgacaatgtggcgttagaacactatcgtaaacagtatccgcaatccaaagatagcaggataaaaacggtcaagattgaccctgatgacttatctcgtatctttgtgtttcttgaagaaaaaaagggttatatagaagtcccttgtaagtatgacccacttggttacaccaaaaaacttagcctttgtgagcatttaagaacggtaaaagtacaccgtgattttataaaaggacaagttgattcattatcactagctaaagcacgtcaggctttgcatgagagaattaagcaggaacatgaaaacttacgtcagatgtcgttacctcatcgtgctaaaaaggctaaaaacggtaagaaaatggctgaactggctggtgttaacagcgatagccctaaatccataacaaccgattatccgatagaggacaccatacaacttcacgaatctacacctgtcgatgatctccaatcactttggaataagcgcagggcattaaggaagtccggaaaatgacatcgcttcagccaacgaataatgacgtcgatgtattactagctgagttccatcagtcattcgtcgtttatccagatgttgaaaaggtttttgaaggtttagattggattgttcgtcgcagccagttcggtaagtttgcgccttctatgctaattacaggcgggacaggtgcgggaaagacttcagtggttgaaatctatttgaacaaccatttttcctcttcagaagtgttaatcacaagagtcaggccaagttttgttgaaacattaatttgggcgatcgaaaagctgaatgttccttacaacagtcggtcgaaacggtctgagattggcctacaagattatttcatcaatagtgttaagaaatctaagctgaagctgttggttatagaagaagctcaagaattgtttgagtgcgcatctcctaaagaaaggcaaaaaatacgtgaccgattaaagatgatcagtgatgaatgtcgattacctatcgtctttattggtattcctaccgccaaacttatcttggaagattcacaatgggacagacgaattatggtgaagcgagacttgccatatatccgaataacgaacgaagagtctttagatgtctatattgccttacttgaggggcttgaaaagaccttacctatttcagtcgctccagaactgactgatatggacatggctatgcgtttattagctgccagtagagggatgctcggtttaatcaaagaacttgtaggttatgcgtttgaactggctttactcgaaggtaaacgtcagattactcaaaacgaatttgttcaggcatttaaatctatttttggtcccgatattagtaacccatttgagattgaactggataaattactaatcccgcagattattgagtatgaaggctatcttttggactcagatagtggggacatcaagtttactcatcagatatttgaggacataccattaacagaattactacgctaacctaggctgctgccaccgctgagcaataactagcataaccccttggggcctctaaacgggtcttgaggggttttttgctgaaacctcaggcatttgagaagcacacggtcacactgcttccggtagtcaataacgaggaagcggaagagcatgtggctggggcttccacccatcttgtcgctgaaatcataaagcgtcccaaaaaaaccataaaatgtcccaataaaacccataaagtgtcctaaacttattttggttgtttttttacaacgaaaaaggacatgttatgtacgttcgcaatcttcgaaaaccttcagcaaacaaaaacgtttataagtttgttagtgtaaaaaatggctgcaatatcatgtgcgaaagctcattggaatatgattgttgctactatttagaatattcggatgatgagaagtgtcgcctactcataggatccatggagaaaaaaatcactggatataccaccgttgatatatcccaatggcatcgtaaagaacattttgaggcatttcagtcagttgctcaatgtacctataaccagaccgttcagctggatattacggcctttttaaagaccgtaaagaaaaataagcacaagttttatccggcctttattcacattcttgcccgcctgatgaatgctcatccggagttccgtatggcaatgaaagacggtgagctggtgatatgggatagtgttcacccttgttacaccgttttccatgagcaaactgaaacgttttcatcgctctggagtgaataccacgacgatttccggcagtttctacacatatattcgcaagatgtggcgtgttacggtgaaaacctggcctatttccctaaagggtttattgagaatatgtttttcgtctcagccaatccctgggtgagtttcaccagttttgatttaaacgtggccaatatggacaacttcttcgcccccgttttcactatgggcaaatattatacgcaaggcgacaaggtgctgatgccgctggcgattcaggttcatcatgccgtttgtgatggcttccatgtcggcagaatgcttaatgaattacaacagtactgcgatgagtggcagggcggggcgtaatttttttaaggcagttattggtgccctggtaccgatcgatcctcagtaatagcaaaccttgttacattggcatggttagtcgctgtgatagttagccgtgtgatcaccaagaggtgtggttttctctactgcacttctgcataaaacagtaagtagttttctttcacaattttcctcagtgttaaaccgaagcagaaaataggacacgttatgctttcatcttaggacactatatggttttactgtgttggtaatggattgatttgtaatggagcgttaggacatcttatggtttcagcgacacatctatgtcgctgaaagcataaaggacgtcaggtggcacttttcaaaccagcaatagacataagcggctatttaacgaccctgccctgaaccgacgaccgggtcatcgtggccggatcttgcggcccctcggcttgaacgaattgttagacattatttgccgactaccttggtgatctcgcctttcacgtagtggacaaattcttccaactgatctgcgcgcgaggccaagcgatcttcttcttgtccaagataagcctgtctagcttcaagtatgacgggctgatactgggccggcaggcgctccattgcccagtcggcagcgacatccttcggcgcgattttgccggttactgcgctgtaccaaatgcgggacaacgtaagcactacatttcgctcatcgccagcccagtcgggcggcgagttccatagcgttaaggtttcatttagcgcctcaaatagatcctgttcaggaaccggatcaaagagttcctccgccgctggacctaccaaggcaacgctatgttctcttgcttttgtcagcaagatagccagatcaatgtcgatcgtggctggctcgaagatacctgcaagaatgtcattgcgctgccattctccaaattgcagttcgcgcttagctggataacgccacggaatgatgtcgtcgtgcacaacaatggtgacttctacagcgcggagaatctcgctctctccaggggaagccgaagtttccaaaaggtcgttgatcaaagctcgccgcgttgtttcatcaagccttacggtcaccgtaaccagcaaatcaatatcactgtgtggcttcaggccgccatccactgcggagccgtacaaatgtacggccagcaacgtcggttcgagatggcgctcgatgacgccaactacctctgatagttgagtcgatacttcggcgatcaccgcttccctcatactcttcctttttcaatattattgaagcatttatcagggttattgtctcatgagcggatacatatttgaatgtatttagaaaaataaacaaatagctagctcactcggtcgctacgctccgggcgtgagactgcggcgggcgctgcggacacatacaaagttacccacagattccgtggataagcaggggactaacatgtgaggcaaaacagcagggccgcgccggtggcgtttttccataggctccgccctcctgccagagttcacataaacagacgcttttccggtgcatctgtgggagccgtgaggctcaaccatgaatctgacagtacgggcgaaacccgacaggacttaaagatccccaccgtttccggcgggtcgctccctcttgcgctctcctgttccgaccctgccgtttaccggatacctgttccgcctttctcccttacgggaagtgtggcgctttctcatagctcacacactggtatctcggctcggtgtaggtcgttcgctccaagctgggctgtaagcaagaactccccgttcagcccgactgctgcgccttatccggtaactgttcacttgagtccaacccggaaaagcacggtaaaacgccactggcagcagccattggtaactgggagttcgcagaggatttgtttagctaaacacgcggttgctcttgaagtgtgcgccaaagtccggctacactggaaggacagatttggttgctgtgctctgcgaaagccagttaccacggttaagcagttccccaactgacttaaccttcgatcaaaccacctccccaggtggttttttcgtttacagggcaaaagattacgcgcagaaaaaaaggatctcaagaagatcctttgatcttttctactgaaccgctctagatttcagtgcaatttatctcttcaaatgtagcacctgaagtcagccccatacgatataagttgtaattctcatgttagtcatgccccgcgcccaccggaaggagctgactgggttgaaggctctcaagggcatcggtcgagatcccggtgcctaatgagtgagctaacttacattaattgcgttgcgctcactgcccgctttccagtcgggaaacctgtcgtgccagctgcattaatgaatcggccaacgcgcggggagaggcggtttgcgtattgggcgccagggtggtttttcttttcaccagtgagacgggcaacagctgattgcccttcaccgcctggccctgagagagttgcagcaagcggtccacgctggtttgccccagcaggcgaaaatcctgtttgatggtggttaacggcgggatataacatgagctgtcttcggtatcgtcgtatcccactaccgagatgtccgcaccaacgcgcagcccggactcggtaatggcgcgcattgcgcccagcgccatctgatcgttggcaaccagcatcgcagtgggaacgatgccctcattcagcatttgcatggtttgttgaaaaccggacatggcactccagtcgccttcccgttccgctatcggctgaatttgattgcgagtgagatatttatgccagccagccagacgcagacgcgccgagacagaacttaatgggcccgctaacagcgcgatttgctggtgacccaatgcgaccagatgctccacgcccagtcgcgtaccgtcttcatgggagaaaataatactgttgatgggtgtctggtcagagacatcaagaaataacgccggaacattagtgcaggcagcttccacagcaatggcatcctggtcatccagcggatagttaatgatcagcccactgacgcgttgcgcgagaagattgtgcaccgccgctttacaggcttcgacgccgcttcgttctaccatcgacaccaccacgctggcacccagttgatcggcgcgagatttaatcgccgcgacaatttgcgacggcgcgtgcagggccagactggaggtggcaacgccaatcagcaacgactgtttgcccgccagttgttgtgccacgcggttgggaatgtaattcagctccgccatcgccgcttccactttttcccgcgttttcgcaga

SEQ ID NO: 5204 - DNA, 13351 bp, synthetic construct
  source 1..13351: mol_type = other DNA
ggggaattgtgagcggataacaattcccctgtagaaataattttgtttaactttaataaggagatataccatgggtgacctgccgtataggcagctgaagatagtacagcgcggctgaaatcatcattaaagcgtaattctgccgaaaaggcagtgagtagttagcgaattccgagcgaaggagatatacatatggcttttctattttctcccaaggctcgggcattttctgacgaatcgctggaaagttacttgttacgggtcgtttcagagaatttttttgactcgtatgaagggctcagcttagctattcgcgaagagctgcatgagcttgattttgaggcgcatggtgcattcccagtagatttaaagaggctcaatgtttaccacgccaaacataatagccattttaggatgcgggctttaggactactcgaaacactactagatttacctcgatacgagctacaaaagttggctttgctaaagtcagatattaaatttaactcctccgtcgctttatataacaatggcgtagacattcccctgaggtttattcgtcaccacgccgaggaagctgttgattcgattccggtatgctcacaatgtcttgcagaagaagcctatataaaacaaagttggcatataaagtgggtaaatgcatgcactaaacatcagtgtgctttgctacataactgcccagaatgctacgctccaattaactatatcgagaatgagtcaattactcattgttcatgcggttttgagctgtcttgcgctagtacctcgcctgtaaatacgttaagtattgaacatttaaataaattactggataaaggtgagcgcaacgatagtaacccgctatttaacaatatgactcttacagaacgttttgctgcgcttctttggtatcaggagcggtattctcaaacagataacttttgtttaaatgatgctgtgaactattttagtaaatggccagcagtttttaatacagagcttgatgaactaagtaaaaatgcagaaatgaagttaatagatctgtttaataaaactgagtttaagtttatttttggggatgctattttagcttgccccagtactcaaaagcagagtgaatctcactttatttatagggctctattagattatttagttactttagttgagagtaaccctaaaactaaaaagcccaacgcagccgacttattagtaagtgtattggaggctgcaactttattaggtacttcagtagagcaggtttataggttgtaccaaaatggtattttgcaaacggcatttcgtcataaaatgaaccagcggatcaacccttataagggcgcgttttttttaagacatgttatagagtacaaaaccagttttggaaatgacaaagctagaatgtatttgtcggcatggtgagtatatgcatcttaaggaactgctagagattacagacaccactgagcgggataggtcattacgtcgtgcttttagcccttatacggcaatgattgatataacaggcagcgaagccgttgccctgattattttgttaaacctgacttatcgaaaaaaccaagttgatgacttgctggataaaaagctcgcaaaacaggctttaaaaagtgaagaccatattaataaatgtattaaggaaatagcgtggtttcatactcataatttaaagtaccctgacattagagtcagtaagcaaaatttagccgtagagcctccaacactgcactcttatgttttgagtagtgctaactatcctaaagcctatggctggtcacataactcagctaaagttaattttgctaaattatttgttagttactttaaatggcaaaatcaagtcagttggctggcacaagtattagctacgaactcggataactggaaatccgcatttacctctcttgggttatccgttaaggcatttaaaagtttatgtgtaaccgttaaaaattcattgcctgaagaggccattcccgactctgttgaccgctactctcgccaaattagaatgccttatcatgatggttacttagctgttacgcctgtaattagccatgttgttcaatcaaaaattcaacaggcggcaattgataaacgagcccgatttagcaatgtagagtttacgcgtcctgctgctgtcagtatgttagctgcttccttaggtggtgttattaatgtgcttaattaccctccttatatacgaagtaaatatcatggtttaagtaactcacgagcatttaaattaaataatgggcaaacagtatttaacgttgaggcactattaaagccggaattaattaaagccttagaaggtattatatttagtaataatgcgctggctcttaaacagcgtagacaacaaaaagtaaaaaatattaaagagctgagaaacacgcttttagaatggttttcacctgtatttgaatggcgcttggacgctattgagaatgggtatgacttagaacagcttgagagtgcttcagagcgactagagtataaaatactatcgctacccgacaatgaactcccttcgctaacgattcctttatttaggttactaaatgaaatgcttggcggtgtgagcatgacacaaaggtatgcttttcatcctaaattaatgagccctttaaaagcagctttacaatggttgcttgttaatcttacagatcaaaaacatgtactgattgaagaagatgatgaacattatcgctatcttcatttaagcggtatacgtgtgtttgatgcgcaagcattatcaaacccttactgctcaggtattccatctttaaccgctgtttggggtatgattcacagctaccaaagaaaacttaatgaggcgctaggaacaaatgtacggttcacatccttttcttggtttattaggaattattctgctgtagcaggaaaaaaacttcctgaactgagccttcaaggcgctcagcaaagtaggctcaagcggccaggaattatcgatggcaaatactgtgatttggtatttgatttaataatacacattgatggttatgaagatgacttacaggcagtagatagtaagcctgacattttgaaagcgcattttccatctaactttgcaggtggtgttatgcatcagcctgagcttaactcaaatataaattggtgctgtttatatagtaatgaaaatcagttatttgaaaagttaaggcgactccctttatctggttgttgggttatgccaactgagcacaaaatacaggatttagatgagctactcttattattaaatagtgactctaaactaagcccatctatgatgggatatatgttactcaccgaaccgatggctagagttggatcacttgaaagactgcattgttatgctgaaccagcaataggagtggtgaaatacgaagcggccactagtgtaaggctaaaaggtattggtaactattttaatagcgctttttggatgctagatgcacaagaaaagtttatgctaatgaaaaaagtttaaccggaaaatacttaatggagctctgtaatatattaaaatatgatcgctcgctttaccctggtaaagctgtgtttttttataaaacggctgactctgattttgttccactagaggctgatattaataaaattcgaggccctaaatctggttttactgaagcattcaccccacagttttccccaaaaaacatctcacctcaggacttaacacataataatatattaactctcgaagagtgttatgtacctccaaatgtggagcatatattttgtcggttttctttgagagtacaggctaactcgttggtcccttcaggctgtagtgatccagaggttttttctttattaaaagagttggcagaaacatttaaagaatgcggtggttataaagaactagcagtaagatattgtcgaaatattttgataggtacatggctttggcgtaatcaaaacaccggcaacactcaaattgaaattaaaaccagcaaagggagttgttatttaatcgataacactcgtaagttagcttgggaaagcaaatgggcttctgatgatctaaaagtattggaagagcttagtaatgaaattgagagcgcattaactgatcccaatgtgttttggagtgctgatataaccgcgaaaatagaagcctcattttgccaagagatttacccaagccaaatccttaacgacaaggttaagcaaggagaggcctcaaaacagtttgtaaaagctaagtgtgcagatggccgttacgctgtaagttttaattcagtaaaaataggagcagcccttcagtcaatagatgattggtgggatgaggatgcaagtaaaagattacgagtgcatgagtttggtgctgataaagaaataggggttgcccgacgtcctcctgattctgaacagaatttttattctattttcaaaaatacggaatggtatttgtcagcccttaaaaattgcattactaataaaaatgaaaaaatagacccagctatttattacttattctctgtattgattaagggcggaatgttccagaaaaaagcagaggctaaaaaggcgtaattatgcaaaggtattacttcacagtccactttttaccaaaacaagctaatctagcgctgcttactggccgttgtatttctattatgcatgggtttattttgaagcataatattgaaggaatgggggttacgtttcctgcatggtcggactcatcaattggtaatgaaattgcttttgtttacacggacaaggagattttaaatacccttaaagatcaggcatattttgtggacatgcaagattgtggcttttttaaagtaagccaagttttagctgtacctgacagctgcgaagaagtacgttttatacgtaatcaggcggtagcaaaaattttcacaggtgaaagtagaagaagattaaagcgcctgcaaaaaagagcgttagcaagaggtgaagattttaatcctaaaaagatcgaagctccccgagagattgatattttccatagagtggctatgactagtaagagttcacaagaggattatattctgcatattcaaaagcaagatgttgactgccaagctgagccatactttagtaattatgggcttgcctcaaatgaaaagtttaaaggcacggttccggatttatcaccctcaatagatagaaattaacctttaataaggagatatagcatgtatatacgcaacttgagaaagccatctccaaataaaaatgtatttaaatttgcgagcactaaagttagtagtgtagttatgtgtgagagttcattagagtttgatgcatgttttcatcatgaatataacgatttgatagagagttttgggagtcagcctgaaggctttaaatatgagtttatgggtaaaagtttaccttacacaccagatgcactgatttcatatacagataaaacccaaaaataccacgaatataagccctattctaaaattgcttctccactatttagagctgaatttgctgccaaaagagctgcatcattaaaattggggattgatcttgttttagtaactgataggcaaattagggtaaatccaatattaaacaacttaaagttattacaccgctactcaggtgtttatggtatcagcggcattcaaaaagagttgctcagttttattcataaatcaggggtaatcaagctaaatgatataagctctcaggttgggataccaattggtgaaacacgatcttttttatttgggctcatgcataaagggttggttaaggctgatctagggtgtgatgatttaactaataatccaacattatgggctacaccatgactgacttttttaatgaatttgatgaaagcctggtaccattaaagccacaaacgcccacacaatacgtcaaattagatgatgccaacttaatccagcgtgatttggataccttttcagatacctttaaaaaccaagcactacaaaggtataagctaattagcactatagataaaaaactttcacgcggctggacccaacgaaatttagatcctattttagatgagctttttaaaggaggtgacgtagttcggccaaattggcgaactgttgctcgttggcgcaaaaaatatatcgaaagcaacggtgatatagcctcccttgctgataaaaaccacaaaatgggaaacagaactaaccgtataaaaggggatgataaattttttgataaagcattagaacgatttttagatgctaaaagacctactatagcaactgcatatcagtactataaagaccttattgttattgaaaatgagagtattgtcgaaggcaagattccaataatatcctacaatgcgtttaataaaagaatcaaagcaatacccccatacgcggtcgcggtcgcaaggcatggtaaatttaaagcagaccaatggtttgcttactgcgctgcgcacgtacccccgacaagaatattagagcgtgtagagattgatcatacaccacttgatttaatcctacttgatgatgagttacttattcccataggaagaccttacctaacattacttattgatgtatttagtggctgtgttcttggttttcatcttagttataaatccccttcctacgtatctgctgctaaggctattactcatgcgattaaaccaaagtctcttgatgctctgaatatagaactacaaaatgattggccttgctttggtaaatttgaaaatttagttgtagataatggtgctgagttttggtctaaaaacttagagcatgcttgtcagtcagcaggaataaatatccaatataaccctgtgcgcaagccttggctaaaaccctttatagagcgtttttttggggtgatgaatgaatatttcttacctgaattaccaggaaagacattttcaaatattttagaaaaagaagagtataaacctgagaaagatgcaattatgcgcttctcaacttttgttgaagaatttcaccgctggatcgcggatgtgtatcatcaagacagtaattcacgtgaaactcgaatcccaattaaacgttggcaacaagggtttgatgcatatcccccattgaccatgaatgaagaggaggaaacgcgtttttcaatgttaatgcgcatctcagactcaagaacgttaacgagaaatgggtttaaatatcaagagttaatgtatgactcaacagctttggctgattatcgtaaacattatccgcaaacaaaagaaactgtaaaaaaactgattaaagtagaccctgatgacatctcaaaaatttatgtttatttagaagagttagaaagttatctcgaagtaccgtgtacagatcctaccggctatacggatggtttaagtatctatgagcataaaacaataaaaaaaattaacagggaagtcatacgggaatctaaagatagtttgggcttagcgaaagcacgcatggctattcatgagcgagtaaagcaagagcaagaagttttcattgaatcaaaaactaaagctaagataacagctgttaaaaagcaagctcaaatagctgatgtaagtaatacaggaacgagcactattaaggtttctgaagaaagtgcagcccctgtgcaaaaacatataagtaacgataattctgacgactgggatgatgacttagaggcatttgaatgaatgccttaacagagatacagatagagaagcttcggaactttagcgattgcatcgttatgcacccgcaaattaaaacaatttttaatgactttgatgaattaagattaaaccgtaaatttcagtcagaccaacagtgtatgctattaattggtgatacaggtgttggaaaaagtcataccattaatcactacaaaaaaagagttctagctacacagaattatagtcgaaacactatgccagtcttagtaagtcgtatatctagggggaaaggcttagatgctactttagtccaaatgctggcagatctggagctatttggaagtagtcaaattaaaaagcgaggctacaaaacagaccttactaaaaagctcgtagagagcttaattaaagctcaagtagagctactcatcattaatgagtttcaggagttaatagagtttaaaagcgtacaagaacgacaacaaattgcaaatgggttaaagtttattagtgaagaggccaaagtgccaatagtactggttggtatgccttgggctgcaaaaatagctgaagaacctcaatgggcttctcgcttagttagaaaaagaaaacttgaatactttagcctaaaaaatgacagcaagtactttcgccaatatttgatggggttagctaagaaaatgccatttgatgtacctcctaagctcgaaagtaaaaataccacaatagcgttgtttgctgcatgtcgaggtgagaatcgagcccttaaacatctactgttggaggctttaaaattagcactaagttgtaatgagtatcttgaaaataaacattttattactgcttatgacaagtttgatttttttaatgataaggaaaaactaaaatcaaaaaatccttttaaacaagacattaaagatattgaaatttatgaggtaatcaaaaactcatcttataacccaaatgcattagacccagaagatatgctcacagatcgagtgtttgcaatagtaaagtaacctaggctgctgccaccgctgagcaataactagcataaccccttggggcctctaaacgggtcttgaggggttttttgctgaaacctcaggcatttgagaagcacacggtcacactgcttccggtagtcaataacgaggaagcggaagagcgtgttgatcggctttaaggatctagtgtcgctgcaaccatagtttgacataatgcaaccataccttgacataattaaagtcatactctgacataaagccccttattaaaaatgatgctaaaaataaattccattataatcaattatttaagaattaattaaaccatagtgtgacatagtggctttttatttgtatagtatgtgtactcaaataataaaaatttacttatgtatatacgcaacttaagaaagccatctccaaataaaaatgtatttaagaggcagtccctcttagaggatccatggagaaaaaaatcactggatataccaccgttgatatatcccaatggcatcgtaaagaacattttgaggcatttcagtcagttgctcaatgtacctataaccagaccgttcagctggatattacggcctttttaaagaccgtaaagaaaaataagcacaagttttatccggcctttattcacattcttgcccgcctgatgaatgctcatccggagttccgtatggcaatgaaagacggtgagctggtgatatgggatagtgttcacccttgttacaccgttttccatgagcaaactgaaacgttttcatcgctctggagtgaataccacgacgatttccggcagtttctacacatatattcgcaagatgtggcgtgttacggtgaaaacctggcctatttccctaaagggtttattgagaatatgtttttcgtctcagccaatccctgggtgagtttcaccagttttgatttaaacgtggccaatatggacaacttcttcgcccccgttttcactatgggcaaatattatacgcaaggcgacaaggtgctgatgccgctggcgattcaggttcatcatgccgtttgtgatggcttccatgtcggcagaatgcttaatgaattacaacagtactgcgatgagtggcagggcggggcgtaatttttttaaggcagttattggtgccctggtaccctgcccaagtcttatgaatgccgtataggcagctgaagataaaaacaatcgattcgatgtttaagttaatgtaattctgccgaaaaggcagtgagtagtaattgaaaaaaccagtcttatatccgggctggtttttttgtttttagcgttataacttttatttcactatgtcactgtatggttgcattttatgtcagtgaatggttgcaggttttttgtaagttattgatatgcctatccagtgtatgtcacgctttgcttgcagcgacatctaggatcttagcgcgcttttatggacgtcaggtggcacttttcaaaccagcaatagacataagcggctatttaacgaccctgccctgaaccgacgaccgggtcatcgtggccggatcttgcggcccctcggcttgaacgaattgttagacattatttgccgactaccttggtgatctcgcctttcacgtagtggacaaattcttccaactgatctgcgcgcgaggccaagcgatcttcttcttgtccaagataagcctgtctagcttcaagtatgacgggctgatactgggccggcaggcgctccattgcccagtcggcagcgacatccttcggcgcgattttgccggttactgcgctgtaccaaatgcgggacaacgtaagcactacatttcgctcatcgccagcccagtcgggcggcgagttccatagcgttaaggtttcatttagcgcctcaaatagatcctgttcaggaaccggatcaaagagttcctccgccgctggacctaccaaggcaacgctatgttctcttgcttttgtcagcaagatagccagatcaatgtcgatcgtggctggctcgaagatacctgcaagaatgtcattgcgctgccattctccaaattgcagttcgcgcttagctggataacgccacggaatgatgtcgtcgtgcacaacaatggtgacttctacagcgcggagaatctcgctctctccaggggaagccgaagtttccaaaaggtcgttgatcaaagctcgccgcgttgtttcatcaagccttacggtcaccgtaaccagcaaatcaatatcactgtgtggcttcaggccgccatccactgcggagccgtacaaatgtacggccagcaacgtcggttcgagatggcgctcgatgacgccaactacctctgatagttgagtcgatacttcggcgatcaccgcttccctcatactcttcctttttcaatattattgaagcatttatcagggttattgtctcatgagcggatacatatttgaatgtatttagaaaaataaacaaatagctagctcactcggtcgctacgctccgggcgtgagactgcggcgggcgctgcggacacatacaaagttacccacagattccgtggataagcaggggactaacatgtgaggcaaaacagcagggccgcgccggtggcgtttttccataggctccgccctcctgccagagttcacataaacagacgcttttccggtgcatctgtgggagccgtgaggctcaaccatgaatctgacagtacgggcgaaacccgacaggacttaaagatccccaccgtttccggcgggtcgctccctcttgcgctctcctgttccgaccctgccgtttaccggatacctgttccgcctttctcccttacgggaagtgtggcgctttctcatagctcacacactggtatctcggctcggtgtaggtcgttcgctccaagctgggctgtaagcaagaactccccgttcagcccgactgctgcgccttatccggtaactgttcacttgagtccaacccggaaaagcacggtaaaacgccactggcagcagccattggtaactgggagttcgcagaggatttgtttagctaaacacgcggttgctcttgaagtgtgcgccaaagtccggctacactggaaggacagatttggttgctgtgctctgcgaaagccagttaccacggttaagcagttccccaactgacttaaccttcgatcaaaccacctccccaggtggttttttcgtttacagggcaaaagattacgcgcagaaaaaaaggatctcaagaagatcctttgatcttttctactgaaccgctctagatttcagtgcaatttatctcttcaaatgtagcacctgaagtcagccccatacgatataagttgtaattctcatgttagtcatgccccgcgcccaccggaaggagctgactgggttgaaggctctcaagggcatcggtcgagatcccggtgcctaatgagtgagctaacttacattaattgcgttgcgctcactgcccgctttccagtcgggaaacctgtcgtgccagctgcattaatgaatcggccaacgcgcggggagaggcggtttgcgtattgggcgccagggtggtttttcttttcaccagtgagacgggcaacagctgattgcccttcaccgcctggccctgagagagttgcagcaagcggtccacgctggtttgccccagcaggcgaaaatcctgtttgatggtggttaacggcgggatataacatgagctgtcttcggtatcgtcgtatcccactaccgagatgtccgcaccaacgcgcagcccggactcggtaatggcgcgcattgcgcccagcgccatctgatcgttggcaaccagcatcgcagtgggaacgatgccctcattcagcatttgcatggtttgttgaaaaccggacatggcactccagtcgccttcccgttccgctatcggctgaatttgattgcgagtgagatatttatgccagccagccagacgcagacgcgccgagacagaacttaatgggcccgctaacagcgcgatttgctggtgacccaatgcgaccagatgctccacgcccagtcgcgtaccgtcttcatgggagaaaataatactgttgatgggtgtctggtcagagacatcaagaaataacgccggaacattagtgcaggcagcttccacagcaatggcatcctggtcatccagcggatagttaatgatcagcccactgacgcgttgcgcgagaagattgtgcaccgccgctttacaggcttcgacgccgcttcgttctaccatcgacaccaccacgctggcacccagttgatcggcgcgagatttaatcgccgcgacaatttgcgacggcgcgtgcagggccagactggaggtggcaacgccaatcagcaacgactgtttgcccgccagttgttgtgccacgcggttgggaatgtaattcagctccgccatcgccgcttccactttttcccgcgttttcgcagaaacgtggctggcctggttcaccacgcgggaaacggtctgataagagacaccggcatactctgcgacatcgtataacgttactggtttcacattcaccaccctgaattgactctcttccgggcgctatcatgccataccgcgaaaggttttgcgccattcgatggtgtccgggatctcgacgctctcccttatgcgactcctgcattaggaaattaatacgactcactata

SEQ ID NO: 5205 - DNA, 13142 bp, synthetic construct
  source 1..13142: mol_type = other DNA
aacgtggctggcctggttcaccacgcgggaaacggtctgataagagacaccggcatactctgcgacatcgtataacgttactggtttcacattcaccaccctgaattgactctcttccgggcgctatcatgccataccgcgaaaggttttgcgccattcgatggtgtccgggatctcgacgctctcccttatgcgactcctgcattaggaaattaatacgactcactataggggaattgtgagcggataacaattcccctgtagaaataattttgtttaactttaataaggagatataccatggcattaatgctgaaaaagtatttgataaaagtacagcgcggctgaaatcatcattaaagcgagacactgctgaataagtagatattaggtagcgaattccgagcgaaggagatatacatatgaaaacgatgttactgcaacgaccaaagccatttgaagatgaaagtcttgagagctatttaatccgaatagcaaacagaaatggttatcaagatgttgatcgttttttgtctgcacttaaacactatttgtgtgatggggattctgaaaaattttcctcattccccactgacatccgtcgaataaacccatattcctcaaaacatagttcagctgctagaagtcatgctctccataagataggtcaattaacatttacggaatccgttgatttactgaagttagccatcaatcgttcgccacttaaatattccccctcagtaacagcagttatccgtggtcacgaggttttccctcgctctttactaaggaccaatatcataccagtatgccctgtttgccttcaggaaaatggttacgccagctatttatggcattttgaaggttatgactactgccatattcacgatctcgctctaacgtataactgtcaatgtggcaaaccttgcgactaccgagtaagcggtttacaactagtttgcagctcatgtggaacgacactaactcatttattagaaaagccaactgataggtcatccgatatttctcactggctggcaggcgaaaccataaaatggttgccagcagttcccgtaagttatcgttgggggctagttcattggtggatgaataataaaaaatcaaaagaactggaaacagagagcttcacgattttttggaaaaattggcccaattcctttcataacctaattcaagaaactcttagttacaatcagacctactcactggtagcacccacccaatggagacttaaagacttactaggggaaatactttttagctcaataaacttgccaggtcgaaatctacaatacaacttgatactgagagagcttttccattatctggaaaatcatttgtgggaaaacaatggattaattgcaaacctaagactaagcgcctttgaggtttctctaattttaggctgtagcactgaagaagtagcgtctatgtcagaacaaggattgttgattcccatacaaaaccggaaacgttatgaacctatgagtctaacaaactgcatttttcattttggtgacgtcttttgcatttggttagctgaatttcagacagacgagttcaaccgttcattttatacctcacgatggtgataaaatgactttagatgagctattggcaactactaaatatgaagaattagtatcttcaactaaacggtcatttcgtccattatccccactgattgacatcactaacaatccgatgacggcattgactatcttagtcaatctgacagagaaagggatctccaataaaaatcttcttgataaagagcgttgtaaagaaaaactgagggatgacaaatggtgggctgcggtccttaagccagcccaataccgtcacagccataatgttaaatttcctgatattcgttctacaggcacaattcgtacagtagcacctgataaccttccggcttatttcatcacgtcgagcaaactgcctaacgtaggatggacttactcaaaggattcctctgacatcaatcgctgtctgttttttacctctgaatttttatgggctggacaaccatgctgtttagccagagcgttaacggatagtgaacacccactttggagtacactcaaaaaacttgggtgttatgagaaaaataaaaaactggcagcaaagctgctttctcaaatccccggcgaactcattgatgttgatttaaccggaaattacctcagccaagtttcttttccagatggtcgggatagttatctgtctttctctcccgtcgcatctcaagctatgcaaagttgtgtttatcaatcactagaacagcattatcgacaaacggcccttatgcgatttgaccgagcaaccaatatggggctactttcagccagttgtggtggccgatttcgcctgattgaaacgaaaccctacatcaaagataaacgacaccactatatttcagaactaccaaactggctcaccaaagaagctattcaatcagtagagcagtttctaagatcagaacaatggctagttacccataatgataagccacgtaatatggcgatagtaaaatcttccattcgttctatggtgaatcgctggttaagctctcgtacaaatacagaagccctgtctccggctgagttagcggaacaacttaataacgacatagcttccaaacgtattataaaaagatacgcttaccaacctaagttgactcggttattcatacaacttatagaaaatactggagaagataacgcttacaaagaagatagaaaaccgacaacgaatagtcagtaccttttgatccctgaactcagaatctctggaggttctgccataagttcatcggtcagtgtaggactattttcaatgatgtcgctttatggatttatccatgcgtttgaacggaatatgcagcttgtactgacgagttttaccattgatagttttgccatttgcgtccatgactatcacttggaaaaacgagggttaaccaaagagccgattaaaaaggcaaaagtacgcaaagatgaacaagaaaaaatagcacctcctgctatctatgatgattatcaattcgatagttgtatcagtctaattatcaaaacatcagaatcaaaaactatacccgctgaaaaaatggtggcattacttccaaaacgctttgcgaggggcgcaatccgattgtccattgatggcattcaagaaataggagcgtttcccaagccattacccgcaatacaggcaataaaaaatccacttggtagttggctgtcgtttgaacctgacttgtctttaatatcaactgattcaatagtcgatatagctaccaatcacaataatttatggttgacagtgatgggataccagtatttagaaccacccacaacaaaacctagttcgctacgagactaccctcatgcccttgtcgaaaatatcttgggatttgttaagcctagaaccgtaacaaaatcgaccaatttagatgatctattttggcgctatcaaatccagccatttggcgtctgcttactaccaaggagtatcaaatgaagcttcctatccatctagcctatgaacgctcaatttccccttcagatgttgcctttttagtcatttggccagatggatacaaagagccactgccttgttacagtcgcacaatccttggccttaacgaaggttcacacgttggctatgatggttctggcgccgtacgaaataacttaaaaatgaatacgctggtcgatggcaatattcatgaattggactattgttctgtgccgtatggagcgaaatcaatagagtgttgtttctccgtttccttttcttctgaattactcaagccttataaatgttcagatgcaggcgtaaaaaagacacttagagaatttgttagtctatataaccaacacgtagggttagaagaactgataatcaagtacctgactaatattgcactaggcacctggctttggcacaacaccaaacgaagctattgtgtctccatagaaattcggccgtggccttgggaaggtgagacaatcatcattgatgatatacgcaaatatctcaagggcgatagagcgaccaacgacttactcaactggaacaagctgattgaacaagtaaaagaggctttcacagaccctatgggcttatgcatattggaggtaaaagctaacttaatcaaaccctcgatggcgcagctttatcctagccaaatgttcaaagaagcagccaagaaagagaacaaccgtctctatcaatcaaccatcattgatggtatcaaatcacccattatgggctgttacaaaactggggcggctatcgctactatagatacttggtatccagacgccgaggaaccaattcgggttggtcactacggtgtagatcgagaaaacagtactgcatatcgacatcccgatacaggaaaggacttctttagtattttaaagcgaatagacgaattggttgatcgactaaaagatgccaaagagttaagtcaagacgaactcaaagatatgcatttccttatggctaatctaatcaaaggtgggctatttcaggaaaaaggggaatgacgacatgatactttactatcgaacagttacctttttgccaaaaataaaaaataacgaagcattagtgggacactgtctgaaggttcttcatggtgtatgtactaagtacacaatcaacactatcggagtgtcttttcctgagtggggagaagaaaccatcggtgacaaaattagttttatctcacccaaccagctcgaactggactttttacttcaacaaacctatttttctgaaatgacagcgcttggatacctaaacatatcgcagtcaaaatcggttcctgaacaatacaatttggctgttttccggcgcaatcaaaaaatcgaccaagcgacaccgaatggacaaagaatcagagccgaacgtttggctaaacgagctatgaatagaggcgattcaccgattcggtttaccccagaggacctcgtatttgaacattatcattctataccgataacaagtacccgtagtggcaaatcattcaggctaaatttgcaatatcaacgactagatacagttccagatggacaatgggcattttcaagttatgggttagcaaatcaagagcttgaaagtagtcctgttcccgtaatttgacctttaataaggagatatagcatgtctgctctaccttctccttctactaccaccctgattgcacttgaaagtgcatttgttactcctgctcgaaacttaactaagtcgcgtgggaaaaacatacaccgttacgtcagtgctaagatgggaaaaagagttacagtagaatcttttctcgagtgtgttgcttgttatcattttgattttgagcccagcatcgttcgcttttgttctcagccgataagattttcatacggtctaaatggtaagacccatacttatgttccagactttctagttcaatttgatacaggtgaatttaagttgtacgaagtaaagtccgatatggaaagctcaaaagaggaatttcaatgtgaatgggaagcaaaagttcaaggtgcgtttgagttaggtttggagctagagctggttacagaggaagaaatactggatgaggtcatatttagcaaccttaaacttttgcatcgatatgcttcaagagataacttgaatcactttcatcaaactctccttgccacctttaaattgaatggtacacaaaccgcaaagagtttaggacaccatcttggcctaaatggaagaaaaatattaccgttcctgtgtgatttgctctcacgaaacttactccaaacaagtttagagacgcctctgtcactggagtctgaatttgaattgggttgttatgcctaataaatcattttcgagttttcatcggaagtcagcatttcagcaagaaaaacttgagccgaatgatagggttgttgatgacaacgatgttgacgaagcaacatatcaagatatatccgcatttcctgacaatatagccactcagattacttttcgtctaagtatccttcgttatttagcaagtaagtgcgaacgaatcattccaaagactatcgaaccgcatcgagtcggtctacaacgtttacacgacaggaagattccaagtgccatatcaatataccgttggtggttagttttcagagcgtctggttgtaacccagttagcttagctcccaagaataaaaataagggtaacagtaaagccaaagtaccaacattcgttgatgctttgatggaacaagctgtagacagagttatctctgggagaaaagtgcgtataagaagtgcctacaggcgcgtgcgaaggaaattacgtcagcataatctgaacaatggaacgaagtacaaatacccaacttatgaatctcttcggaaacgggttaaaaagaaaactcctttcgagttactggctgcgaagaagggcgagcgagtcgcgaaaagagagttccgtcgtatgggaaaaaagatattgacttcttacgtccttgaaagggttgaaatagatcatacggtagtggatctctttgctgtacatgaagaacatcgcgtgccattgggccgaccttggcttactcaattagttgattgttacagcaaagcagttattggtttttacctggggtttgaaccaccgagctacgtatctgtgtcacttgctcttaaaaatgcaatactgcggaaagatgaccttttgagttcgttcgactcagtagaaaatgaatggctatgttacggtatccctgacttactcgtaactgataatggtaaagagtttttgtctaaggcttttgataaagcatgtgaatcactgttgatcaatgtacatcaaaacagagtcgaaacgcccgacgataaaccgcatgttgaacgcagctacggaactatcaatacttctctgctagacgatttaccagggaaggcttttagccaataccttcagagagaaggttatgattcagtgggcgaagctactcttacattggatgaaattaaagaaatttacttaatttggttagtcgatatttatcatccaaaatctaaccagagaggtactaattgtccgaatgtagcatggaaaaggggatgtcaagaatgggagcctgaagagtttaatggatctaaagatgaattggactttaaattcgctattgttgatcaaaaacaactaaccaaagctggtgtaactgtttataaagaactgacatacagtagtgaacgtttagctgagtataggggtaagaaaggaaatcataaagttcagttcaaatataatccagagtgtatggcggtcatttgggtgttagatgaggacctgaacgagtacttcacggttcacgcgatagactacgaatatgcaagtagagtgtctctctggcaacataaatacaatatgaagtatcaagcagagttaaattcagcagaatatgacgaggacaaggaaattgatgcagagataaaaattgaagaaatcgctgaccgttcgattgttaagactaagaaaatcagagcccggaggcgtggagctagacatcaagagaatagcgcaagagcaaaatccatcagcgatgccaagcctgtcccatcccagaaacatgaggacgaaattgtaattgttgataatgaagattgggatattgattatgtttaagaaatcatcagatgaatgaaactcgtgaagcacgcatctcaaaagctaaaagagcatttgtatccacgccgagtgttacgaaaatcttatgctacatggatagatgtagagatttatcagacttcgattctgagcctacttgcatgatggtctatggtgcttccggagtcggtaaaacgaccattatcaaaaaatatttaaatcaaaacaggcgagattctgaagttgggggcgatataattccagtcttgcatatagagctgccggacaatgcgaaaccagtagatgctgcgagggagttgctggttgaaatgggggacccgctggcgctttatgaaacagatttagccagattgacgaaaaaactgattgatttaatcccggtggttggtgtgaagttgattattatcgatgagttccagcatttagtagaagaaaggtcaaatcgggttctcacgcaagtaggtaactggctaaaaatgatactcaacaaaacgaaatgtccaatcgttcttttcggcatgccatattcaaaggttgtactacaagctaactcgcaacttcatggacgattttccattcagttcgagctgaggcccttcagttaccagggaggtgaaggcgtattcaaaacttttttggagtacctcgataaggctttaccttttgaaaagcaggctggcttagctaacgaaagtttgcagaaaaaattgtatgcattctctcaaggaaacatgcgctcattgagaaacctcatttatcaagcatctattgaagcgattgataatcagcatgcgacgatcaccgaagaagattttgtttttgcatcgaagttgacctcgggtgataaacctattacctggaaaaatccttttgatgagggtgttaaagtgacggaagatatgttgcgtccgccaccaaaggatattgggtgggaggattattatcataacgttaaacccaaaaaccaaagacgcaagggtagtaatatgtttgaataacctaggctgctgccaccgctgagcaataactagcataaccccttggggcctctaaacgggtcttgaggggttttttgctgaaacctcaggcatttgagaagcacacggtcacactgcttccggtagtcaataaacgaggaagcggaagagctaaaccttaaattaatcggaaaaattgttgaaacaaccataaagtgatatttacaaccatatattgatatttggtgcaaccataacttgatattgcctcttcatagtctagacttatgtaagtttacgacaaaatcgtgaagaggcaatattatgtctgctctaccttctccttctactaccaccctgattgcacttgaaagtgcatttgttactcctgctcgaaacttaactaagtcgcgtgggaaaaacatacaccgttacgtcagtgctaagaagaggcagtccctcttagaggatccatggagaaaaaaatcactggatataccaccgttgatatatcccaatggcatcgtaaagaacattttgaggcatttcagtcagttgctcaatgtacctataaccagaccgttcagctggatattacggcctttttaaagaccgtaaagaaaaataagcacaagttttatccggcctttattcacattcttgcccgcctgatgaatgctcatccggagttccgtatggcaatgaaagacggtgagctggtgatatgggatagtgttcacccttgttacaccgttttccatgagcaaactgaaacgttttcatcgctctggagtgaataccacgacgatttccggcagtttctacacatatattcgcaagatgtggcgtgttacggtgaaaacctggcctatttccctaaagggtttattgagaatatgtttttcgtctcagccaatccctgggtgagtttcaccagttttgatttaaacgtggccaatatggacaacttcttcgcccccgttttcactatgggcaaatattatacgcaaggcgacaaggtgctgatgccgctggcgattcaggttcatcatgccgtttgtgatggcttccatgtcggcagaatgcttaatgaattacaacagtactgcgatgagtggcagggcggggcgtaatttttttaaggcagttattggtgccctggtaccctgcccaagtcttatgaatgagtgtccgtgactgatgcaaggttatcggaactgtaatgattatatgttttctaattttgaagtggttcttttgatgagttttgccagttgctgaaagtaactttcttactgcagtagttttgctgaaatactcgattcacaaaaatatcaacttatggttgttttgtgagatatcaatatatggttgttttgtggttaagttgctgattataaataattattaaatatcactttatggttgcatcaacaaaaatcgaatgattaagagccgtttgacgtcaggtggcacttttcccggtaaaccagcaatagacataagcggctatttaacgaccctgccctgaaccgacgaccgggtcatcgtggccggatcttgcggcccctcggcttgaacgaattgttagacattatttgccgactaccttggtgatctcgcctttcacgtagtggacaaattcttccaactgatctgcgcgcgaggccaagcgatcttcttcttgtccaagataagcctgtctagcttcaagtatgacgggctgatactgggccggcaggcgctccattgcccagtcggcagcgacatccttcggcgcgattttgccggttactgcgctgtaccaaatgcgggacaacgtaagcactacatttcgctcatcgccagcccagtcgggcggcgagttccatagcgttaaggtttcatttagcgcctcaaatagatcctgttcaggaaccggatcaaagagttcctccgccgctggacctaccaaggcaacgctatgttctcttgcttttgtcagcaagatagccagatcaatgtcgatcgtggctggctcgaagatacctgcaagaatgtcattgcgctgccattctccaaattgcagttcgcgcttagctggataacgccacggaatgatgtcgtcgtgcacaacaatggtgacttctacagcgcggagaatctcgctctctccaggggaagccgaagtttccaaaaggtcgttgatcaaagctcgccgcgttgtttcatcaagccttacggtcaccgtaaccagcaaatcaatatcactgtgtggcttcaggccgccatccactgcggagccgtacaaatgtacggccagcaacgtcggttcgagatggcgctcgatgacgccaactacctctgatagttgagtcgatacttcggcgatcaccgcttccctcatactcttcctttttcaatattattgaagcatttatcagggttattgtctcatgagcggatacatatttgaatgtatttagaaaaataaacaaatagctagctcactcggtcgctacgctccgggcgtgagactgcggcgggcgctgcggacacatacaaagttacccacagattccgtggataagcaggggactaacatgtgaggcaaaacagcagggccgcgccggtggcgtttttccataggctccgccctcctgccagagttcacataaacagacgcttttccggtgcatctgtgggagccgtgaggctcaaccatgaatctgacagtacgggcgaaacccgacaggacttaaagatccccaccgtttccggcgggtcgctccctcttgcgctctcctgttccgaccctgccgtttaccggatacctgttccgcctttctcccttacgggaagtgtggcgctttctcatagctcacacactggtatctcggctcggtgtaggtcgttcgctccaagctgggctgtaagcaagaactccccgttcagcccgactgctgcgccttatccggtaactgttcacttgagtccaacccggaaaagcacggtaaaacgccactggcagcagccattggtaactgggagttcgcagaggatttgtttagctaaacacgcggttgctcttgaagtgtgcgccaaagtccggctacactggaaggacagatttggttgctgtgctctgcgaaagccagttaccacggttaagcagttccccaactgacttaaccttcgatcaaaccacctccccaggtggttttttcgtttacagggcaaaagattacgcgcagaaaaaaaggatctcaagaagatcctttgatcttttctactgaaccgctctagatttcagtgcaatttatctcttcaaatgtagcacctgaagtcagccccatacgatataagttgtaattctcatgttagtcatgccccgcgcccaccggaaggagctgactgggttgaaggctctcaagggcatcggtcgagatcccggtgcctaatgagtgagctaacttacattaattgcgttgcgctcactgcccgctttccagtcgggaaacctgtcgtgccagctgcattaatgaatcggccaacgcgcggggagaggcggtttgcgtattgggcgccagggtggtttttcttttcaccagtgagacgggcaacagctgattgcccttcaccgcctggccctgagagagttgcagcaagcggtccacgctggtttgccccagcaggcgaaaatcctgtttgatggtggttaacggcgggatataacatgagctgtcttcggtatcgtcgtatcccactaccgagatgtccgcaccaacgcgcagcccggactcggtaatggcgcgcattgcgcccagcgccatctgatcgttggcaaccagcatcgcagtgggaacgatgccctcattcagcatttgcatggtttgttgaaaaccggacatggcactccagtcgccttcccgttccgctatcggctgaatttgattgcgagtgagatatttatgccagccagccagacgcagacgcgccgagacagaacttaatgggcccgctaacagcgcgatttgctggtgacccaatgcgaccagatgctccacgcccagtcgcgtaccgtcttcatgggagaaaataatactgttgatgggtgtctggtcagagacatcaagaaataacgccggaacattagtgcaggcagcttccacagcaatggcatcctggtcatccagcggatagttaatgatcagcccactgacgcgttgcgcgagaagattgtgcaccgccgctttacaggcttcgacgccgcttcgttctaccatcgacaccaccacgctggcacccagttgatcggcgcgagatttaatcgccgcgacaatttgcgacggcgcgtgcagggccagactggaggtggcaacgccaatcagcaacgactgtttgcccgccagttgttgtgccacgcggttgggaatgtaattcagctccgccatcgccgcttccactttttcccgcgttttcgcaga

SEQ ID NO: 5206 - DNA, 12874 bp, synthetic construct
  source 1..12874: mol_type = other DNA
ggtctgataagagacaccggcatactctgcgacatcgtataacgttactggtttcacattcaccaccctgaattgactctcttccgggcgctatcatgccataccgcgaaaggttttgcgccattcgatggtgtccgggatctcgacgctctcccttatgcgactcctgcattaggaatggataaccgtattaccgcctttgagtgagctgataccgctcgccgcagccgaactaccgagcgcagcgagtcagtgagcgaggagcgactcctgcattaggaaattaatacgactcactataggggaattgtgagcggataacaattcccctgtagaaataattttgtttaactttaataaggagatataccatgggtgaactgccgagtaggtagctgataacagtacagcgcggctgaaatcatcattaaagcggtgaactgccgagtaggtagctgataacggatccgaattcgagcgaaggagatatacatatgtttttgcaaagacctaaaccttacagcgatgaaagtttagaaagtttctttatccgagtggctaacaaaaatggctacggtgatgtccatcgcttcctagaagccactaaacgattccttcaagacattgaccataatggctatcaaacctttccgactgatataactcggataaacccatactcagctaaaaacagttccagcgcacgaactgcgtcattcctgaaacttgcacaattgacatttaatgaaccgccagagctacttgggttggcaattaacagaacaaacatgaaatactcgccgtcaactagcgcggttgttagaggtgcagaagtctttcctcgcagtttactacggacgcactccatcccctgctgtcctttgtgtctgcgagaaaatggctacgcctcctacctttggcactttcaggggtacgaatactgccacagccataacgtacctttaattaccacttgtagctgtggtaaggagtttgactaccgagtatctgggttaaagggcatttgctgcaaatgcaaggagcctatcaccttaaccagcagggagaacggtcatgaggcagcgtgtactgtttcaaactggcttgctggccatgaatctaaacctctgccaaatcttcctaaaagctaccgatggggtttagttcattggtggatgggtattaaagatagcgagttcgatcacttttcgttcgttcaatttttctcaaactggccaaggtcattccactcgataatcgaagatgaagtagagttcaaccttgagcatgctgttgtcagcacgtctgaattacgactaaaagatcttcttggtcgattgtttttcggttcaattcggttacctgagcggaatcttcaacacaatatcatccttggtgagcttctctgctatttagaaaatcgtttatggcaagacaagggattaatcgccaacctcaaaatgaacgcgttagaggcgactgtaatgttaaattgtagcctcgatcagattgcatcaatggttgaacaacgcatcttgaagccaaatcgaaaaagcaagcccaacagccctcttgatgttaccgattatctatttcatttcggcgatattttctgtctttggttagctgagttccaaagcgatgagtttaaccgttcgttttatgtgtcgaggtggtaaatgcaaactctgaaagaactaatcgcatccaatcctgacgacttaacaactgaacttaagagagcatttcgtccactcacaccgcatattgcaattgatggtaatgaacttgacgcactgacgatattagtcaatttaaccgataagactgatgatcagaaagacctgctcgatcgagccaaatgcaagcaaaaacttcgagatgaaaaatggtgggctagctgcataaattgcgttaattacagacaaagccataacccaaaattcccggatatacgttctgaaggcgtgattcgaacccaagccctgggtgaattaccgagtttcctactctcgtcctcaaaaatcccaccataccattggtcatatagccatgattcaaaatacgtcaacaaaagcgcattcctcaccaatgagttttgttgggatggtgagatctcatgtttgggtgagcttcttaaagatgcagatcacccactttggaatactttgaaaaagttaggttgttctcaaaaaacttgcaaagcaatggcaaaacaactagctgatattactctcacgactatcaatgtcacactcgcaccaaattacctgactcaaatatctctccccgatagtgatacatcctacatttcactctctcctgttgcatcgctatcgatgcaaagccactttcatcagaggctccaagatgaaaatcggcatagcgcgataacgcggtttagccgaactaccaacatgggggtcactgcgatgacatgtggcggcgcatttagaatgttaaagtctggcgctaagttttccagcccccctcatcaccgattaaacagtaaacgaagttggttgacgtcagagcatgttcagtcattaaaacagtaccagcgcctcaacaaaagcctcatacctgaaaactctcggattgcactccgtagaaaatacaaaatcgagcttcaaaatatggtcagatcttggtttgcaatgcaagaccatacccttgattcgaacatacttatccaacatttgaatcatgacctatcttacttaggagccacaaaacgttttgcatacgatccagcgatgaccaagctctttactgagcttttgaaacgagagttatcaaattcaatcaataatggtgagcaacacactaatggatcgtttttagtcctaccgaatatcagggtttgtggcgcaacagctttaagctccccggtaacggtggggattccatcacttacagctttctttggcttcgttcacgcatttgaacggaatataaatcgcaccacctcatcgtttcgtgttgaatcctttgcgatatgcgtccatcaactacatgtcgagaagcgaggtttgacagcagagtttgtggaaaaaggcgacgggactatatccgctcccgcgacccgggatgactggcagtgtgatgtcgtatttagccttattttgaacaccaactttgctcaacatattgaccaagatacgttagttacatcactaccaaagcgattggctcggggttcagcaaaaattgcgattgatgactttaaacatatcaactcattctcgacattagaaacagcgatcgaatctctgccaatagaagctggtaggtggttatcactttacgcacagtcaaacaataatctaagtgatctattagcagccatgacagaggaccatcagctcatggcaagctgcgtcggttaccacttgttagaagagcccaaagataaaccaaactccctcagaggttacaaacacgctatcgccgagtgcatcattggactcattaactcaatcacctttagctcagagactgatcccaacacaatcttttggtcgctaaagaactatcaaaactacctagtggtacagccaaggagtatcaacgatgaaactaccgacaaatctagcctatgagcgctctatcgacccatcagatgtctgtttttttgtcgtctggcccgatgatagaaaaacacctttaacctacaattctcgtactctgctcgggcaaatggaagcggcatcattagcctatgatgtctcaggtcaaccaataaaaagtgccaccgctgaggcgttagctcaagggaaccctcatcaagttgatttctgccacgttccatacggtgcgagtcatattgaatgcagtttctccgtctcgttttcttctgaactacgtcaaccatataagtgtaactcaagcaaagttaaacaaacgctagtgcaattagtcgagctctacgaaacgaaaatcggctggactgagctagcaacccgatatttgatgaacatttgcaacggtaaatggctgtggaaaaatacccgtaaagcctattgctggaacattgtacttacaccttggccttggaacggggaaaaggttggatttgaagatattcgtactaactacacctcacggcaagactttaaaaataataaaaattggtctgctatagttgaaatgatcaaaaccgcattttctagtactgatgggctggcgatatttgaagtcagggccaccttgcacttgccaacgaatgctatggtgcggccaagccaagttttcacagaaaaagaaagtggcagtaaaagtaaatctaaaactcaaaacagtcgagtttttcagagtacaactattgatggtgaacgatcgccaatactaggggcctttaaaacgggagcagctattgcaaccattgacgactggtatcctgaagccactgagccactaagggtcggacggtttggggttcatcgcgaagatgtcacttgctaccgtcatccgtctaccggaaaagattttttctcgatattacaacaagcagagcactatattgaagtgttgagcgccaacaaaactcccgctcaagaaactatcaacgacatgcactttttaatggctaacctgattaagggtgggatgttccagcataaaggagactgactgtgaaatggtattataagacaatcacctttctgccagagttgtgcaacaacgagtcactggctgcaaagtgtctccgcgttctgcatggatttaactatcagtatgagacacgaaatatcggcgtttcatttccgctttggtgtgatgcaacggttggaaaaaagatttcatttgtcagcaagaacaagatagaactcgacttactacttaaacaacactatttcgtccaaatggaacaacttcaatactttcatatatccaacactgttctcgtcccagaagattgtacatacgtttcctttagacgctgtcaatctatagataagctcacagcagcagggctggcaaggaaaatcagacgcctggagaaacgtgctctatctagaggcgagcaatttgacccatcatcttttgctcaaaaagagcatactgcaatagcgcactaccactcacttggggagtccagcaaacagacgaaccgcaactttcgactcaatatcaggatgctctcggagcaaccccgtgaggggaactcgatttttagtagctatggcttatcaaattcagaaaactcgtttcagcctgtacccttaatctgacctttaataaggagatataccatggcgacaagtttacctacgccctcagcaattacgacttcggcgttagagtatgcattccatactcccgctcgcaatctaacgaaatctcgcggaaaaaacattcatcgttatgtcagtgtaaagatgagtaagaggattacggtagaatctactctagagtgtgatgcctgctatcactttgattttgagccaagtattgttcgcttttgcgctcaaccgattcgatttttatattatctcaatggtcagtctcactcctatgttcctgactttctagttcaatttgataccaacgagtttgttctatatgaagtaaagtcagcttatgctaagaacaaacctgattttgatgttgaatgggaggcgaaagtaaaagcagcaactgaactagggctagaattggagcttgttgaagagagtgatattagggatacggttgtattaaataatcttaagcgcatgcatcgttatgcttcgaaagatgagctgaataacgtacataactctctcttaaaaataataaagtacaatggcgcccaatctgcaagatgcttgggagaacagttgggtttaaaaggccgaactgttttaccaattttgtgcgatttgctgtcaaggtgtttactcgatacacgtttggataagcctctatctcttgaatctcgatttgagttggccagttatggctaagaaagggttctcaagtttccatagaaaagcagtctcttcccaagatacgcttgaatcgatagagcttgtctctagcgctaattgtctagaaagtgttacgtatcaagatatatcagcatttcccgaaacaattgcggtagagattaatttccgattaagcattcttcgctttttagcgcgaaagtgcgaaaccattgtggccaaatcaattgaaccacatcgtgtagagctacagcaaaactatagtagaaaaatacccagtgcaataacgatatatcgatggtggcttgcttttcgaaaatcagactacaaccccattagcttagcacctaatatcaaggatagaggtaatagagagacaaaagtgtcaacagttgttgattctattatggaacaggcagttgaaagagttatatctggacgaaaagtcaatgttagctctgcatataaacgtgttcgacgaaaagttcgtcaatacaatctaactcatggaacgaaatacacgtatcctaagtacgaatctgtaagaaagcgagtaaaaaagaaaaccccatttgagttattagccgcagggaaaggggagagagtagctaagagagagtttcgccgaatgggaaaaaagatcctcacgtctagcgtgctagagagggttgaaatagatcacactgtcgttgacctttttgcagtacacgaagagtatcgaatcccattgggccgaccttggcttactcaattggttgattgttacagtaaagctgtaatcggtttttatttaggtttcgagcctcctagctatgtgtcggtttcccttgcacttaagaatgcaatacaacgcaaagatgacttaatctcctcgtatgaatcgatcgagaatgaatggctatgttatggcatcccagacctactcgtaactgataatggtaaagagtttttgtcgaaagcatttgatcaagcatgtgaatcactattgatcaatgtgcatcaaaataaagttgagacgcccgacaacaaacctcatgttgaacgtaactacgggactattaatacttctctgttagacgatttacctgggaaatccttcagccagtaccttcaaagagaagggtacgactctgtgggagaagctacccttacactcaatgagattagagaaatttacttaatttggttggtggatatttatcataaaaaacccaatcagagaggcactaattgtcctaatgttgcgtggaaaaagggttgtcaagaatgggaaccagaggagttctctggttctaaagacgaattagactttaaatttgctattgttgattacaaacaacttactaaagtagggataactgtctacaaagaactgagttatagcaatgaccgtttagctgaatatagagggaagaaaggaaaccataaagttcagttcaagtataaccctgagtgtatggcagttatttgggtgttggatgaggatatgaatgagtactttacagttaatgcgattgactacgaatatgcaagtagagtatcactttggcaacataaatataacatgaaatatcaagcagaactaaattcagcagaatatgatgaggacaaggaaattgatgcagaaataaaaattgaagaaatcgcagatcgttcaattgttaagactaacaaaatcagagctcggaggcgtggcgctaggcatcaagagaatagcgcaagggctaagtcaatcagtaatgcgaacccggcctcgatacaaaaacatgaagatgaaatcgttagtgcagataatgacgattgggatattgattatgtctgagaaatcgtcaaatgagtgaaacgcgtgaggctcgtatatcaagagctaaaagggcatttgtatccacaccgagcgttaggaaaatcttgagttacatggatagatgtagagatctatcagacctagagtctgagcctacatgcatgatggtctatggtgcttcgggtgtaggtaaaacgaccgtcatcaagaaatacttaaatcaaaacagaagagagtccgaagccgggggcgatataataccggttttgcatattgagttgccagacaatgcgaagccagtagatgcagcaagggaattgctggttgaaatgggtgacccgctagcactttatgaaactgacttagctagattgacgaaaagactgactgaattaatccctgcggtcggcgtgaagctgattattatcgatgagttccaacatttggtggaagaaaggtcaaatcgggttcttacccaagtaggtaattggctaaaaatgatacttaacaaaacgaaatgtccaattgttatatttggtatgccatactcaaaagttgtactgcaagcaaactcgcaacttcacgggcgattttccattcaggttgaactgcgcccctttagctaccagggaggtagaggtgtatttaaaacttttttggaataccttgataaagccctaccttttgaaaaacaggctggcttagccaacgaaagtttgcagaaaaaattgtatgcattctctcagggaaacatgcgttcgttgagaaaccttatttatcaagcatctatcgaagcaattgataatcagcatgagacgataaccgaagaagatttcgtttttgcatcgaagttgacatcgggcgataaacccaactcatggaaaaatccttttgaggagggtgttgaggtaacagaagatatgttacgaccgccaccaaaagatattggttgggaggactatttgagacattcaaccccgagagtgagtaaaccaggtagaaataaaaactttttcgaataacctaggctgctgcgctgctgccaccgctgagcaataactagcataaccccttggggcctctaaacgggtcttgaggggttttttgctgaaacctcaggcatttgttgttgatacaaccataaaatgataattacacccataaattgataattatcacacccataaattgatattgcctcttcatggtctaaacttcagtaagtttacgacattttcctcgaggtcatttccggggatccatggagaaaaaaatcactggatataccaccgttgatatatcccaatggcatcgtaaagaacattttgaggcatttcagtcagttgctcaatgtacctataaccagaccgttcagctggatattacggcctttttaaagaccgtaaagaaaaataagcacaagttttatccggcctttattcacattcttgcccgcctgatgaatgctcatccggagttccgtatggcaatgaaagacggtgagctggtgatatgggatagtgttcacccttgttacaccgttttccatgagcaaactgaaacgttttcatcgctctggagtgaataccacgacgatttccggcagtttctacacatatattcgcaagatgtggcgtgttacggtgaaaacctggcctatttccctaaagggtttattgagaatatgtttttcgtctcagccaatccctgggtgagtttcaccagttttgatttaaacgtggccaatatggacaacttcttcgcccccgttttcactatgggcaaatattatacgcaaggcgacaaggtgctgatgccgctggcgattcaggttcatcatgccgtttgtgatggcttccatgtcggcagaatgcttaatgaattacaacagtactgcgatgagtggcagggcggggcgtaatttttttaaggcagttattggtgcccttctagagtccttactgcagtagttttgctgaaatactcgattcacaaaaatatcaacttatggttgttttgtgagatatcaatatatggttgttttgtggttaagttgctgattataaataattattaaatatcactttatggttgcatcaacaggtaccgagctcgaattcactggccgtcgttttacaacgtcgtgactgggaaaaccctggcgttacccaacttaatcgccttgctatcgtggccggatcttgcggcccctcggcttgaacgaattgttagacattatttgccgactaccttggtgatctcgcctttcacgtagtggacaaattcttccaactgatctgcgcgcgaggccaagcgatcttcttcttgtccaagataagcctgtctagcttcaagtatgacgggctgatactgggccggcaggcgctccattgcccagtcggcagcgacatccttcggcgcgattttgccggttactgcgctgtaccaaatgcgggacaacgtaagcactacatttcgctcatcgccagcccagtcgggcggcgagttccatagcgttaaggtttcatttagcgcctcaaatagatcctgttcaggaaccggatcaaagagttcctccgccgctggacctaccaaggcaacgctatgttctcttgcttttgtcagcaagatagccagatcaatgtcgatcgtggctggctcgaagatacctgcaagaatgtcattgcgctgccattctccaaattgcagttcgcgcttagctggataacgccacggaatgatgtcgtcgtgcacaacaatggtgacttctacagcgcggagaatctcgctctctccaggggaagccgaagtttccaaaaggtcgttgatcaaagctcgccgcgttgtttcatcaagccttacggtcaccgtaaccagcaaatcaatatcactgtgtggcttcaggccgccatccactgcggagccgtacaaatgtacggccagcaacgtcggttcgagatggcgctcgatgacgccaactacctctgatagttgagtcgatacttcggcgatcaccgcttccctcatactcttcctttttcaatattattgaagcatttatcagggttattgtctcatgagcggatacatatttgaatgtatttagaaaaataaacaaatagctagctcactcggtcgctacgctccgggcgtgagactgcggcgggcgctgcggacacatacaaagttacccacagattccgtggataagcaggggactaacatgtgaggcaaaacagcagggccgcgccggtggcgtttttccataggctccgccctcctgccagagttcacataaacagacgcttttccggtgcatctgtgggagccgtgaggctcaaccatgaatctgacagtacgggcgaaacccgacaggacttaaagatccccaccgtttccggcgggtcgctccctcttgcgctctcctgttccgaccctgccgtttaccggatacctgttccgcctttctcccttacgggaagtgtggcgctttctcatagctcacacactggtatctcggctcggtgtaggtcgttcgctccaagctgggctgtaagcaagaactccccgttcagcccgactgctgcgccttatccggtaactgttcacttgagtccaacccggaaaagcacggtaaaacgccactggcagcagccattggtaactgggagttcgcagaggatttgtttagctaaacacgcggttgctcttgaagtgtgcgccaaagtccggctacactggaaggacagatttggttgctgtgctctgcgaaagccagttaccacggttaagcagttccccaactgacttaaccttcgatcaaaccacctccccaggtggttttttcgtttacagggcaaaagattacgcgcagaaaaaaaggatctcaagaagatcctttgatcttttctactgaaccgctctagatttcagtgcaatttatctcttcaaatgtagcacctgaagtcagccccatacgatataagttgtaattctcatgttagtcatgccccgcgcccaccggaaggagctgactgggttgaaggctctcaagggcatcggtcgagatcccggtgcctaatgagtgagctaacttacattaattgcgttgcgctcactgcccgctttccagtcgggaaacctgtcgtgccagctgcattaatgaatcggccaacgcgcggggagaggcggtttgcgtattgggcgccagggtggtttttcttttcaccagtgagacgggcaacagctgattgcccttcaccgcctggccctgagagagttgcagcaagcggtccacgctggtttgccccagcaggcgaaaatcctgtttgatggtggttaacggcgggatataacatgagctgtcttcggtatcgtcgtatcccactaccgagatgtccgcaccaacgcgcagcccggactcggtaatggcgcgcattgcgcccagcgccatctgatcgttggcaaccagcatcgcagtgggaacgatgccctcattcagcatttgcatggtttgttgaaaaccggacatggcactccagtcgccttcccgttccgctatcggctgaatttgattgcgagtgagatatttatgccagccagccagacgcagacgcgccgagacagaacttaatgggcccgctaacagcgcgatttgctggtgacccaatgcgaccagatgctccacgcccagtcgcgtaccgtcttcatgggagaaaataatactgttgatgggtgtctggtcagagacatcaagaaataacgccggaacattagtgcaggcagcttccacagcaatggcatcctggtcatccagcggatagttaatgatcagcccactgacgcgttgcgcgagaagattgtgcaccgccgctttacaggcttcgacgccgcttcgttctaccatcgacaccaccacgctggcacccagttgatcggcgcgagatttaatcgccgcgacaatttgcgacggcgcgtgcagggccagactggaggtggcaacgccaatcagcaacgactgtttgcccgccagttgttgtgccacgcggttgggaatgtaattcagctccgccatcgccgcttccactttttcccgcgttttcgcagaaacgtggctggcctggttcaccacgcgggaaac

SEQ ID NO: 5207 - DNA, 12828 bp, synthetic construct
  source 1..12828: mol_type = other DNA
aacgtggctggcctggttcaccacgcgggaaacggtctgataagagacaccggcatactctgcgacatcgtataacgttactggtttcacattcaccaccctgaattgactctcttccgggcgctatcatgccataccgcgaaaggttttgcgccattcgatggtgtccgggatctcgacgctctcccttatgcgactcctgcattaggaatggataaccgtattaccgcctttgagtgagctgataccgctcgccgcagccgaacgaccgagcgcagcgagtcagtgagcgaggacacaagcttttacagctagctcagtcctaggtattatgctagcgtcgacgtggagatataccatgggtgaactgccgagtaggtagctgataacagtacagcgcggctgaaatcatcattaaagcggtgaactgccgagtaggtagctgataacggatccgaattcgagcgaaggagatatacatatgtttttgcaaagacctaaaccttacagcgatgaaagtttagaaagtttctttatccgagtggctaacaaaaatggctacggtgatgtccatcgcttcctagaagccactaaacgattccttcaagacattgaccataatggctatcaaacctttccgactgatataactcggataaacccatactcagctaaaaacagttccagcgcacgaactgcgtcattcctgaaacttgcacaattgacatttaatgaaccgccagagctacttgggttggcaattaacagaacaaacatgaaatactcgccgtcaactagcgcggttgttagaggtgcagaagtctttcctcgcagtttactacggacgcactccatcccctgctgtcctttgtgtctgcgagaaaatggctacgcctcctacctttggcactttcaggggtacgaatactgccacagccataacgtacctttaattaccacttgtagctgtggtaaggagtttgactaccgagtatctgggttaaagggcatttgctgcaaatgcaaggagcctatcaccttaaccagcagggagaacggtcatgaggcagcgtgtactgtttcaaactggcttgctggccatgaatctaaacctctgccaaatcttcctaaaagctaccgatggggtttagttcattggtggatgggtattaaagatagcgagttcgatcacttttcgttcgttcaatttttctcaaactggccaaggtcattccactcgataatcgaagatgaagtagagttcaaccttgagcatgctgttgtcagcacgtctgaattacgactaaaagatcttcttggtcgattgtttttcggttcaattcggttacctgagcggaatcttcaacacaatatcatccttggtgagcttctctgctatttagaaaatcgtttatggcaagacaagggattaatcgccaacctcaaaatgaacgcgttagaggcgactgtaatgttaaattgtagcctcgatcagattgcatcaatggttgaacaacgcatcttgaagccaaatcgaaaaagcaagcccaacagccctcttgatgttaccgattatctatttcatttcggcgatattttctgtctttggttagctgagttccaaagcgatgagtttaaccgttcgttttatgtgtcgaggtggtaaatgcaaactctgaaagaactaatcgcatccaatcctgacgacttaacaactgaacttaagagagcatttcgtccactcacaccgcatattgcaattgatggtaatgaacttgacgcactgacgatattagtcaatttaaccgataagactgatgatcagaaagacctgctcgatcgagccaaatgcaagcaaaaacttcgagatgaaaaatggtgggctagctgcataaattgcgttaattacagacaaagccataacccaaaattcccggatatacgttctgaaggcgtgattcgaacccaagccctgggtgaattaccgagtttcctactctcgtcctcaaaaatcccaccataccattggtcatatagccatgattcaaaatacgtcaacaaaagcgcattcctcaccaatgagttttgttgggatggtgagatctcatgtttgggtgagcttcttaaagatgcagatcacccactttggaatactttgaaaaagttaggttgttctcaaaaaacttgcaaagcaatggcaaaacaactagctgatattactctcacgactatcaatgtcacactcgcaccaaattacctgactcaaatatctctccccgatagtgatacatcctacatttcactctctcctgttgcatcgctatcgatgcaaagccactttcatcagaggctccaagatgaaaatcggcatagcgcgataacgcggtttagccgaactaccaacatgggggtcactgcgatgacatgtggcggcgcatttagaatgttaaagtctggcgctaagttttccagcccccctcatcaccgattaaacagtaaacgaagttggttgacgtcagagcatgttcagtcattaaaacagtaccagcgcctcaacaaaagcctcatacctgaaaactctcggattgcactccgtagaaaatacaaaatcgagcttcaaaatatggtcagatcttggtttgcaatgcaagaccatacccttgattcgaacatacttatccaacatttgaatcatgacctatcttacttaggagccacaaaacgttttgcatacgatccagcgatgaccaagctctttactgagcttttgaaacgagagttatcaaattcaatcaataatggtgagcaacacactaatggatcgtttttagtcctaccgaatatcagggtttgtggcgcaacagctttaagctccccggtaacggtggggattccatcacttacagctttctttggcttcgttcacgcatttgaacggaatataaatcgcaccacctcatcgtttcgtgttgaatcctttgcgatatgcgtccatcaactacatgtcgagaagcgaggtttgacagcagagtttgtggaaaaaggcgacgggactatatccgctcccgcgacccgggatgactggcagtgtgatgtcgtatttagccttattttgaacaccaactttgctcaacatattgaccaagatacgttagttacatcactaccaaagcgattggctcggggttcagcaaaaattgcgattgatgactttaaacatatcaactcattctcgacattagaaacagcgatcgaatctctgccaatagaagctggtaggtggttatcactttacgcacagtcaaacaataatctaagtgatctattagcagccatgacagaggaccatcagctcatggcaagctgcgtcggttaccacttgttagaagagcccaaagataaaccaaactccctcagaggttacaaacacgctatcgccgagtgcatcattggactcattaactcaatcacctttagctcagagactgatcccaacacaatcttttggtcgctaaagaactatcaaaactacctagtggtacagccaaggagtatcaacgatgaaactaccgacaaatctagcctatgagcgctctatcgacccatcagatgtctgtttttttgtcgtctggcccgatgatagaaaaacacctttaacctacaattctcgtactctgctcgggcaaatggaagcggcatcattagcctatgatgtctcaggtcaaccaataaaaagtgccaccgctgaggcgttagctcaagggaaccctcatcaagttgatttctgccacgttccatacggtgcgagtcatattgaatgcagtttctccgtctcgttttcttctgaactacgtcaaccatataagtgtaactcaagcaaagttaaacaaacgctagtgcaattagtcgagctctacgaaacgaaaatcggctggactgagctagcaacccgatatttgatgaacatttgcaacggtaaatggctgtggaaaaatacccgtaaagcctattgctggaacattgtacttacaccttggccttggaacggggaaaaggttggatttgaagatattcgtactaactacacctcacggcaagactttaaaaataataaaaattggtctgctatagttgaaatgatcaaaaccgcattttctagtactgatgggctggcgatatttgaagtcagggccaccttgcacttgccaacgaatgctatggtgcggccaagccaagttttcacagaaaaagaaagtggcagtaaaagtaaatctaaaactcaaaacagtcgagtttttcagagtacaactattgatggtgaacgatcgccaatactaggggcctttaaaacgggagcagctattgcaaccattgacgactggtatcctgaagccactgagccactaagggtcggacggtttggggttcatcgcgaagatgtcacttgctaccgtcatccgtctaccggaaaagattttttctcgatattacaacaagcagagcactatattgaagtgttgagcgccaacaaaactcccgctcaagaaactatcaacgacatgcactttttaatggctaacctgattaagggtgggatgttccagcataaaggagactgactgtgaaatggtattataagacaatcacctttctgccagagttgtgcaacaacgagtcactggctgcaaagtgtctccgcgttctgcatggatttaactatcagtatgagacacgaaatatcggcgtttcatttccgctttggtgtgatgcaacggttggaaaaaagatttcatttgtcagcaagaacaagatagaactcgacttactacttaaacaacactatttcgtccaaatggaacaacttcaatactttcatatatccaacactgttctcgtcccagaagattgtacatacgtttcctttagacgctgtcaatctatagataagctcacagcagcagggctggcaaggaaaatcagacgcctggagaaacgtgctctatctagaggcgagcaatttgacccatcatcttttgctcaaaaagagcatactgcaatagcgcactaccactcacttggggagtccagcaaacagacgaaccgcaactttcgactcaatatcaggatgctctcggagcaaccccgtgaggggaactcgatttttagtagctatggcttatcaaattcagaaaactcgtttcagcctgtacccttaatctgacctttaataaggagatataccatggcgacaagtttacctacgccctcagcaattacgacttcggcgttagagtatgcattccatactcccgctcgcaatctaacgaaatctcgcggaaaaaacattcatcgttatgtcagtgtaaagatgagtaagaggattacggtagaatctactctagagtgtgatgcctgctatcactttgattttgagccaagtattgttcgcttttgcgctcaaccgattcgatttttatattatctcaatggtcagtctcactcctatgttcctgactttctagttcaatttgataccaacgagtttgttctatatgaagtaaagtcagcttatgctaagaacaaacctgattttgatgttgaatgggaggcgaaagtaaaagcagcaactgaactagggctagaattggagcttgttgaagagagtgatattagggatacggttgtattaaataatcttaagcgcatgcatcgttatgcttcgaaagatgagctgaataacgtacataactctctcttaaaaataataaagtacaatggcgcccaatctgcaagatgcttgggagaacagttgggtttaaaaggccgaactgttttaccaattttgtgcgatttgctgtcaaggtgtttactcgatacacgtttggataagcctctatctcttgaatctcgatttgagttggccagttatggctaagaaagggttctcaagtttccatagaaaagcagtctcttcccaagatacgcttgaatcgatagagcttgtctctagcgctaattgtctagaaagtgttacgtatcaagatatatcagcatttcccgaaacaattgcggtagagattaatttccgattaagcattcttcgctttttagcgcgaaagtgcgaaaccattgtggccaaatcaattgaaccacatcgtgtagagctacagcaaaactatagtagaaaaatacccagtgcaataacgatatatcgatggtggcttgcttttcgaaaatcagactacaaccccattagcttagcacctaatatcaaggatagaggtaatagagagacaaaagtgtcaacagttgttgattctattatggaacaggcagttgaaagagttatatctggacgaaaagtcaatgttagctctgcatataaacgtgttcgacgaaaagttcgtcaatacaatctaactcatggaacgaaatacacgtatcctaagtacgaatctgtaagaaagcgagtaaaaaagaaaaccccatttgagttattagccgcagggaaaggggagagagtagctaagagagagtttcgccgaatgggaaaaaagatcctcacgtctagcgtgctagagagggttgaaatagatcacactgtcgttgacctttttgcagtacacgaagagtatcgaatcccattgggccgaccttggcttactcaattggttgattgttacagtaaagctgtaatcggtttttatttaggtttcgagcctcctagctatgtgtcggtttcccttgcacttaagaatgcaatacaacgcaaagatgacttaatctcctcgtatgaatcgatcgagaatgaatggctatgttatggcatcccagacctactcgtaactgataatggtaaagagtttttgtcgaaagcatttgatcaagcatgtgaatcactattgatcaatgtgcatcaaaataaagttgagacgcccgacaacaaacctcatgttgaacgtaactacgggactattaatacttctctgttagacgatttacctgggaaatccttcagccagtaccttcaaagagaagggtacgactctgtgggagaagctacccttacactcaatgagattagagaaatttacttaatttggttggtggatatttatcataaaaaacccaatcagagaggcactaattgtcctaatgttgcgtggaaaaagggttgtcaagaatgggaaccagaggagttctctggttctaaagacgaattagactttaaatttgctattgttgattacaaacaacttactaaagtagggataactgtctacaaagaactgagttatagcaatgaccgtttagctgaatatagagggaagaaaggaaaccataaagttcagttcaagtataaccctgagtgtatggcagttatttgggtgttggatgaggatatgaatgagtactttacagttaatgcgattgactacgaatatgcaagtagagtatcactttggcaacataaatataacatgaaatatcaagcagaactaaattcagcagaatatgatgaggacaaggaaattgatgcagaaataaaaattgaagaaatcgcagatcgttcaattgttaagactaacaaaatcagagctcggaggcgtggcgctaggcatcaagagaatagcgcaagggctaagtcaatcagtaatgcgaacccggcctcgatacaaaaacatgaagatgaaatcgttagtgcagataatgacgattgggatattgattatgtctgagaaatcgtcaaatgagtgaaacgcgtgaggctcgtatatcaagagctaaaagggcatttgtatccacaccgagcgttaggaaaatcttgagttacatggatagatgtagagatctatcagacctagagtctgagcctacatgcatgatggtctatggtgcttcgggtgtaggtaaaacgaccgtcatcaagaaatacttaaatcaaaacagaagagagtccgaagccgggggcgatataataccggttttgcatattgagttgccagacaatgcgaagccagtagatgcagcaagggaattgctggttgaaatgggtgacccgctagcactttatgaaactgacttagctagattgacgaaaagactgactgaattaatccctgcggtcggcgtgaagctgattattatcgatgagttccaacatttggtggaagaaaggtcaaatcgggttcttacccaagtaggtaattggctaaaaatgatacttaacaaaacgaaatgtccaattgttatatttggtatgccatactcaaaagttgtactgcaagcaaactcgcaacttcacgggcgattttccattcaggttgaactgcgcccctttagctaccagggaggtagaggtgtatttaaaacttttttggaataccttgataaagccctaccttttgaaaaacaggctggcttagccaacgaaagtttgcagaaaaaattgtatgcattctctcagggaaacatgcgttcgttgagaaaccttatttatcaagcatctatcgaagcaattgataatcagcatgagacgataaccgaagaagatttcgtttttgcatcgaagttgacatcgggcgataaacccaactcatggaaaaatccttttgaggagggtgttgaggtaacagaagatatgttacgaccgccaccaaaagatattggttgggaggactatttgagacattcaaccccgagagtgagtaaaccaggtagaaataaaaactttttcgaataacctaggctgctgcgctgctgccaccgctgagcaataactagcataaccccttggggcctctaaacgggtcttgaggggttttttgctgaaacctcaggcatttgttgttgatacaaccataaaatgataattacacccataaattgataattatcacacccataaattgatattgcctcttcatggtctaaacttcagtaagtttacgacattttcctcgaggtcatttccggggatccatggagaaaaaaatcactggatataccaccgttgatatatcccaatggcatcgtaaagaacattttgaggcatttcagtcagttgctcaatgtacctataaccagaccgttcagctggatattacggcctttttaaagaccgtaaagaaaaataagcacaagttttatccggcctttattcacattcttgcccgcctgatgaatgctcatccggagttccgtatggcaatgaaagacggtgagctggtgatatgggatagtgttcacccttgttacaccgttttccatgagcaaactgaaacgttttcatcgctctggagtgaataccacgacgatttccggcagtttctacacatatattcgcaagatgtggcgtgttacggtgaaaacctggcctatttccctaaagggtttattgagaatatgtttttcgtctcagccaatccctgggtgagtttcaccagttttgatttaaacgtggccaatatggacaacttcttcgcccccgttttcactatgggcaaatattatacgcaaggcgacaaggtgctgatgccgctggcgattcaggttcatcatgccgtttgtgatggcttccatgtcggcagaatgcttaatgaattacaacagtactgcgatgagtggcagggcggggcgtaatttttttaaggcagttattggtgcccttctagagtccttactgcagtagttttgctgaaatactcgattcacaaaaatatcaacttatggttgttttgtgagatatcaatatatggttgttttgtggttaagttgctgattataaataattattaaatatcactttatggttgcatcaacaggtaccgagctcgaattcactggccgtcgttttacaacgtcgtgactgggaaaaccctggcgttacccaacttaatcgccttgctatcgtggccggatcttgcggcccctcggcttgaacgaattgttagacattatttgccgactaccttggtgatctcgcctttcacgtagtggacaaattcttccaactgatctgcgcgcgaggccaagcgatcttcttcttgtccaagataagcctgtctagcttcaagtatgacgggctgatactgggccggcaggcgctccattgcccagtcggcagcgacatccttcggcgcgattttgccggttactgcgctgtaccaaatgcgggacaacgtaagcactacatttcgctcatcgccagcccagtcgggcggcgagttccatagcgttaaggtttcatttagcgcctcaaatagatcctgttcaggaaccggatcaaagagttcctccgccgctggacctaccaaggcaacgctatgttctcttgcttttgtcagcaagatagccagatcaatgtcgatcgtggctggctcgaagatacctgcaagaatgtcattgcgctgccattctccaaattgcagttcgcgcttagctggataacgccacggaatgatgtcgtcgtgcacaacaatggtgacttctacagcgcggagaatctcgctctctccaggggaagccgaagtttccaaaaggtcgttgatcaaagctcgccgcgttgtttcatcaagccttacggtcaccgtaaccagcaaatcaatatcactgtgtggcttcaggccgccatccactgcggagccgtacaaatgtacggccagcaacgtcggttcgagatggcgctcgatgacgccaactacctctgatagttgagtcgatacttcggcgatcaccgcttccctcatactcttcctttttcaatattattgaagcatttatcagggttattgtctcatgagcggatacatatttgaatgtatttagaaaaataaacaaatagctagctcactcggtcgctacgctccgggcgtgagactgcggcgggcgctgcggacacatacaaagttacccacagattccgtggataagcaggggactaacatgtgaggcaaaacagcagggccgcgccggtggcgtttttccataggctccgccctcctgccagagttcacataaacagacgcttttccggtgcatctgtgggagccgtgaggctcaaccatgaatctgacagtacgggcgaaacccgacaggacttaaagatccccaccgtttccggcgggtcgctccctcttgcgctctcctgttccgaccctgccgtttaccggatacctgttccgcctttctcccttacgggaagtgtggcgctttctcatagctcacacactggtatctcggctcggtgtaggtcgttcgctccaagctgggctgtaagcaagaactccccgttcagcccgactgctgcgccttatccggtaactgttcacttgagtccaacccggaaaagcacggtaaaacgccactggcagcagccattggtaactgggagttcgcagaggatttgtttagctaaacacgcggttgctcttgaagtgtgcgccaaagtccggctacactggaaggacagatttggttgctgtgctctgcgaaagccagttaccacggttaagcagttccccaactgacttaaccttcgatcaaaccacctccccaggtggttttttcgtttacagggcaaaagattacgcgcagaaaaaaaggatctcaagaagatcctttgatcttttctactgaaccgctctagatttcagtgcaatttatctcttcaaatgtagcacctgaagtcagccccatacgatataagttgtaattctcatgttagtcatgccccgcgcccaccggaaggagctgactgggttgaaggctctcaagggcatcggtcgagatcccggtgcctaatgagtgagctaacttacattaattgcgttgcgctcactgcccgctttccagtcgggaaacctgtcgtgccagctgcattaatgaatcggccaacgcgcggggagaggcggtttgcgtattgggcgccagggtggtttttcttttcaccagtgagacgggcaacagctgattgcccttcaccgcctggccctgagagagttgcagcaagcggtccacgctggtttgccccagcaggcgaaaatcctgtttgatggtggttaacggcgggatataacatgagctgtcttcggtatcgtcgtatcccactaccgagatgtccgcaccaacgcgcagcccggactcggtaatggcgcgcattgcgcccagcgccatctgatcgttggcaaccagcatcgcagtgggaacgatgccctcattcagcatttgcatggtttgttgaaaaccggacatggcactccagtcgccttcccgttccgctatcggctgaatttgattgcgagtgagatatttatgccagccagccagacgcagacgcgccgagacagaacttaatgggcccgctaacagcgcgatttgctggtgacccaatgcgaccagatgctccacgcccagtcgcgtaccgtcttcatgggagaaaataatactgttgatgggtgtctggtcagagacatcaagaaataacgccggaacattagtgcaggcagcttccacagcaatggcatcctggtcatccagcggatagttaatgatcagcccactgacgcgttgcgcgagaagattgtgcaccgccgctttacaggcttcgacgccgcttcgttctaccatcgacaccaccacgctggcacccagttgatcggcgcgagatttaatcgccgcgacaatttgcgacggcgcgtgcagggccagactggaggtggcaacgccaatcagcaacgactgtttgcccgccagttgttgtgccacgcggttgggaatgtaattcagctccgccatcgccgcttccactttttcccgcgttttcgcaga

SEQ ID NO: 5208 - DNA, 11860 bp, synthetic construct
  source 1..11860: mol_type = other DNA
gcgctgcggacacatacaaagttacccacagattccgtggataagcaggggactaacatgtgaggcaaaacagcagggccgcgccggtggcgtttttccataggctccgccctcctgccagagttcacataaacagacgcttttccggtgcatctgtgggagccgtgaggctcaaccatgaatctgacagtacgggcgaaacccgacaggacttaaagatccccaccgtttccggcgggtcgctccctcttgcgctctcctgttccgaccctgccgtttaccggatacctgttccgcctttctcccttacgggaagtgtggcgctttctcatagctcacacactggtatctcggctcggtgtaggtcgttcgctccaagctgggctgtaagcaagaactccccgttcagcccgactgctgcgccttatccggtaactgttcacttgagtccaacccggaaaagcacggtaaaacgccactggcagcagccattggtaactgggagttcgcagaggatttgtttagctaaacacgcggttgctcttgaagtgtgcgccaaagtccggctacactggaaggacagatttggttgctgtgctctgcgaaagccagttaccacggttaagcagttccccaactgacttaaccttcgatcaaaccacctccccaggtggttttttcgtttacagggcaaaagattacgcgcagaaaaaaaggatctcaagaagatcctttgatcttttctactgaaccgctctagatttcagtgcaatttatctcttcaaatgtagcacctgaagtcagccccatacgatataagttgtaattctcatgttagtcatgccccgcgcccaccggaaggagctgactgggttgaaggctctcaagggcatcggtcgagatcccggtgcctaatgagtgagctaacttacattaattgcgttgcgctcactgcccgctttccagtcgggaaacctgtcgtgccagctgcattaatgaatcggccaacgcgcggggagaggcggtttgcgtattgggcgccagggtggtttttcttttcaccagtgagacgggcaacagctgattgcccttcaccgcctggccctgagagagttgcagcaagcggtccacgctggtttgccccagcaggcgaaaatcctgtttgatggtggttaacggcgggatataacatgagctgtcttcggtatcgtcgtatcccactaccgagatgtccgcaccaacgcgcagcccggactcggtaatggcgcgcattgcgcccagcgccatctgatcgttggcaaccagcatcgcagtgggaacgatgccctcattcagcatttgcatggtttgttgaaaaccggacatggcactccagtcgccttcccgttccgctatcggctgaatttgattgcgagtgagatatttatgccagccagccagacgcagacgcgccgagacagaacttaatgggcccgctaacagcgcgatttgctggtgacccaatgcgaccagatgctccacgcccagtcgcgtaccgtcttcatgggagaaaataatactgttgatgggtgtctggtcagagacatcaagaaataacgccggaacattagtgcaggcagcttccacagcaatggcatcctggtcatccagcggatagttaatgatcagcccactgacgcgttgcgcgagaagattgtgcaccgccgctttacaggcttcgacgccgcttcgttctaccatcgacaccaccacgctggcacccagttgatcggcgcgagatttaatcgccgcgacaatttgcgacggcgcgtgcagggccagactggaggtggcaacgccaatcagcaacgactgtttgcccgccagttgttgtgccacgcggttgggaatgtaattcagctccgccatcgccgcttccactttttcccgcgttttcgcagaaacgtggctggcctggttcaccacgcgggaaacggtctgataagagacaccggcatactctgcgacatcgtataacgttactggtttcacattcaccaccctgaattgactctcttccgggcgctatcatgccataccgcgaaaggttttgcgccattcgatggtgtccgggatctcgacgctctcccttatgcgactcctgcattaggaatggataaccgtattaccgcctttgagtgagctgataccgctcgccgcagccgaacgaccgagcgcagcgagtcagtgagcgaggacacaagctttgacagctagctcagtcctaggtataatactagcgtcgacgtggagatataccatgggtgaactgccgagtaggtagctgataacagtacagcgcggctgaaatcatcattaaagcggtgaactgccgagtaggtagctgataacggatccgaattcgagcgaaggagatatacatatgtttttgcaaagacctaaaccttacagcgatgaaagtttagaaagtttctttatccgagtggctaacaaaaatggctacggtgatgtccatcgcttcctagaagccactaaacgattccttcaagacattgaccataatggctatcaaacctttccgactgatataactcggataaacccatactcagctaaaaacagttccagcgcacgaactgcgtcattcctgaaacttgcacaattgacatttaatgaaccgccagagctacttgggttggcaattaacagaacaaacatgaaatactcgccgtcaactagcgcggttgttagaggtgcagaagtctttcctcgcagtttactacggacgcactccatcccctgctgtcctttgtgtctgcgagaaaatggctacgcctcctacctttggcactttcaggggtacgaatactgccacagccataacgtacctttaattaccacttgtagctgtggtaaggagtttgactaccgagtatctgggttaaagggcatttgctgcaaatgcaaggagcctatcaccttaaccagcagggagaacggtcatgaggcagcgtgtactgtttcaaactggcttgctggccatgaatctaaacctctgccaaatcttcctaaaagctaccgatggggtttagttcattggtggatgggtattaaagatagcgagttcgatcacttttcgttcgttcaatttttctcaaactggccaaggtcattccactcgataatcgaagatgaagtagagttcaaccttgagcatgctgttgtcagcacgtctgaattacgactaaaagatcttcttggtcgattgtttttcggttcaattcggttacctgagcggaatcttcaacacaatatcatccttggtgagcttctctgctatttagaaaatcgtttatggcaagacaagggattaatcgccaacctcaaaatgaacgcgttagaggcgactgtaatgttaaattgtagcctcgatcagattgcatcaatggttgaacaacgcatcttgaagccaaatcgaaaaagcaagcccaacagccctcttgatgttaccgattatctatttcatttcggcgatattttctgtctttggttagctgagttccaaagcgatgagtttaaccgttcgttttatgtgtcgaggtggtaaatgcaaactctgaaagaactaatcgcatccaatcctgacgacttaacaactgaacttaagagagcatttcgtccactcacaccgcatattgcaattgatggtaatgaacttgacgcactgacgatattagtcaatttaaccgataagactgatgatcagaaagacctgctcgatcgagccaaatgcaagcaaaaacttcgagatgaaaaatggtgggctagctgcataaattgcgttaattacagacaaagccataacccaaaattcccggatatacgttctgaaggcgtgattcgaacccaagccctgggtgaattaccgagtttcctactctcgtcctcaaaaatcccaccataccattggtcatatagccatgattcaaaatacgtcaacaaaagcgcattcctcaccaatgagttttgttgggatggtgagatctcatgtttgggtgagcttcttaaagatgcagatcacccactttggaatactttgaaaaagttaggttgttctcaaaaaacttgcaaagcaatggcaaaacaactagctgatattactctcacgactatcaatgtcacactcgcaccaaattacctgactcaaatatctctccccgatagtgatacatcctacatttcactctctcctgttgcatcgctatcgatgcaaagccactttcatcagaggctccaagatgaaaatcggcatagcgcgataacgcggtttagccgaactaccaacatgggggtcactgcgatgacatgtggcggcgcatttagaatgttaaagtctggcgctaagttttccagcccccctcatcaccgattaaacagtaaacgaagttggttgacgtcagagcatgttcagtcattaaaacagtaccagcgcctcaacaaaagcctcatacctgaaaactctcggattgcactccgtagaaaatacaaaatcgagcttcaaaatatggtcagatcttggtttgcaatgcaagaccatacccttgattcgaacatacttatccaacatttgaatcatgacctatcttacttaggagccacaaaacgttttgcatacgatccagcgatgaccaagctctttactgagcttttgaaacgagagttatcaaattcaatcaataatggtgagcaacacactaatggatcgtttttagtcctaccgaatatcagggtttgtggcgcaacagctttaagctccccggtaacggtggggattccatcacttacagctttctttggcttcgttcacgcatttgaacggaatataaatcgcaccacctcatcgtttcgtgttgaatcctttgcgatatgcgtccatcaactacatgtcgagaagcgaggtttgacagcagagtttgtggaaaaaggcgacgggactatatccgctcccgcgacccgggatgactggcagtgtgatgtcgtatttagccttattttgaacaccaactttgctcaacatattgaccaagatacgttagttacatcactaccaaagcgattggctcggggttcagcaaaaattgcgattgatgactttaaacatatcaactcattctcgacattagaaacagcgatcgaatctctgccaatagaagctggtaggtggttatcactttacgcacagtcaaacaataatctaagtgatctattagcagccatgacagaggaccatcagctcatggcaagctgcgtcggttaccacttgttagaagagcccaaagataaaccaaactccctcagaggttacaaacacgctatcgccgagtgcatcattggactcattaactcaatcacctttagctcagagactgatcccaacacaatcttttggtcgctaaagaactatcaaaactacctagtggtacagccaaggagtatcaacgatgaaactaccgacaaatctagcctatgagcgctctatcgacccatcagatgtctgtttttttgtcgtctggcccgatgatagaaaaacacctttaacctacaattctcgtactctgctcgggcaaatggaagcggcatcattagcctatgatgtctcaggtcaaccaataaaaagtgccaccgctgaggcgttagctcaagggaaccctcatcaagttgatttctgccacgttccatacggtgcgagtcatattgaatgcagtttctccgtctcgttttcttctgaactacgtcaaccatataagtgtaactcaagcaaagttaaacaaacgctagtgcaattagtcgagctctacgaaacgaaaatcggctggactgagctagcaacccgatatttgatgaacatttgcaacggtaaatggctgtggaaaaatacccgtaaagcctattgctggaacattgtacttacaccttggccttggaacggggaaaaggttggatttgaagatattcgtactaactacacctcacggcaagactttaaaaataataaaaattggtctgctatagttgaaatgatcaaaaccgcattttctagtactgatgggctggcgatatttgaagtcagggccaccttgcacttgccaacgaatgctatggtgcggccaagccaagttttcacagaaaaagaaagtggcagtaaaagtaaatctaaaactcaaaacagtcgagtttttcagagtacaactattgatggtgaacgatcgccaatactaggggcctttaaaacgggagcagctattgcaaccattgacgactggtatcctgaagccactgagccactaagggtcggacggtttggggttcatcgcgaagatgtcacttgctaccgtcatccgtctaccggaaaagattttttctcgatattacaacaagcagagcactatattgaagtgttgagcgccaacaaaactcccgctcaagaaactatcaacgacatgcactttttaatggctaacctgattaagggtgggatgttccagcataaaggagactgactgtgaaatggtattataagacaatcacctttctgccagagttgtgcaacaacgagtcactggctgcaaagtgtctccgcgttctgcatggatttaactatcagtatgagacacgaaatatcggcgtttcatttccgctttggtgtgatgcaacggttggaaaaaagatttcatttgtcagcaagaacaagatagaactcgacttactacttaaacaacactatttcgtccaaatggaacaacttcaatactttcatatatccaacactgttctcgtcccagaagattgtacatacgtttcctttagacgctgtcaatctatagataagctcacagcagcagggctggcaaggaaaatcagacgcctggagaaacgtgctctatctagaggcgagcaatttgacccatcatcttttgctcaaaaagagcatactgcaatagcgcactaccactcacttggggagtccagcaaacagacgaaccgcaactttcgactcaatatcaggatgctctcggagcaaccccgtgaggggaactcgatttttagtagctatggcttatcaaattcagaaaactcgtttcagcctgtacccttaatctgacctttaataaggagatataccatggcgacaagtttacctacgccctcagcaattacgacttcggcgttagagtatgcattccatactcccgctcgcaatctaacgaaatctcgcggaaaaaacattcatcgttatgtcagtgtaaagatgagtaagaggattacggtagaatctactctagagtgtgatgcctgctatcactttgattttgagccaagtattgttcgcttttgcgctcaaccgattcgatttttatattatctcaatggtcagtctcactcctatgttcctgactttctagttcaatttgataccaacgagtttgttctatatgaagtaaagtcagcttatgctaagaacaaacctgattttgatgttgaatgggaggcgaaagtaaaagcagcaactgaactagggctagaattggagcttgttgaagagagtgatattagggatacggttgtattaaataatcttaagcgcatgcatcgttatgcttcgaaagatgagctgaataacgtacataactctctcttaaaaataataaagtacaatggcgcccaatctgcaagatgcttgggagaacagttgggtttaaaaggccgaactgttttaccaattttgtgcgatttgctgtcaaggtgtttactcgatacacgtttggataagcctctatctcttgaatctcgatttgagttggccagttatggctaagaaagggttctcaagtttccatagaaaagcagtctcttcccaagatacgcttgaatcgatagagcttgtctctagcgctaattgtctagaaagtgttacgtatcaagatatatcagcatttcccgaaacaattgcggtagagattaatttccgattaagcattcttcgctttttagcgcgaaagtgcgaaaccattgtggccaaatcaattgaaccacatcgtgtagagctacagcaaaactatagtagaaaaatacccagtgcaataacgatatatcgatggtggcttgcttttcgaaaatcagactacaaccccattagcttagcacctaatatcaaggatagaggtaatagagagacaaaagtgtcaacagttgttgattctattatggaacaggcagttgaaagagttatatctggacgaaaagtcaatgttagctctgcatataaacgtgttcgacgaaaagttcgtcaatacaatctaactcatggaacgaaatacacgtatcctaagtacgaatctgtaagaaagcgagtaaaaaagaaaaccccatttgagttattagccgcagggaaaggggagagagtagctaagagagagtttcgccgaatgggaaaaaagatcctcacgtctagcgtgctagagagggttgaaatagatcacactgtcgttgacctttttgcagtacacgaagagtatcgaatcccattgggccgaccttggcttactcaattggttgattgttacagtaaagctgtaatcggtttttatttaggtttcgagcctcctagctatgtgtcggtttcccttgcacttaagaatgcaatacaacgcaaagatgacttaatctcctcgtatgaatcgatcgagaatgaatggctatgttatggcatcccagacctactcgtaactgataatggtaaagagtttttgtcgaaagcatttgatcaagcatgtgaatcactattgatcaatgtgcatcaaaataaagttgagacgcccgacaacaaacctcatgttgaacgtaactacgggactattaatacttctctgttagacgatttacctgggaaatccttcagccagtaccttcaaagagaagggtacgactctgtgggagaagctacccttacactcaatgagattagagaaatttacttaatttggttggtggatatttatcataaaaaacccaatcagagaggcactaattgtcctaatgttgcgtggaaaaagggttgtcaagaatgggaaccagaggagttctctggttctaaagacgaattagactttaaatttgctattgttgattacaaacaacttactaaagtagggataactgtctacaaagaactgagttatagcaatgaccgtttagctgaatatagagggaagaaaggaaaccataaagttcagttcaagtataaccctgagtgtatggcagttatttgggtgttggatgaggatatgaatgagtactttacagttaatgcgattgactacgaatatgcaagtagagtatcactttggcaacataaatataacatgaaatatcaagcagaactaaattcagcagaatatgatgaggacaaggaaattgatgcagaaataaaaattgaagaaatcgcagatcgttcaattgttaagactaacaaaatcagagctcggaggcgtggcgctaggcatcaagagaatagcgcaagggctaagtcaatcagtaatgcgaacccggcctcgatacaaaaacatgaagatgaaatcgttagtgcagataatgacgattgggatattgattatgtctgagaaatcgtcaaatgagtgaaacgcgtgaggctcgtatatcaagagctaaaagggcatttgtatccacaccgagcgttaggaaaatcttgagttacatggatagatgtagagatctatcagacctagagtctgagcctacatgcatgatggtctatggtgcttcgggtgtaggtaaaacgaccgtcatcaagaaatacttaaatcaaaacagaagagagtccgaagccgggggcgatataataccggttttgcatattgagttgccagacaatgcgaagccagtagatgcagcaagggaattgctggttgaaatgggtgacccgctagcactttatgaaactgacttagctagattgacgaaaagactgactgaattaatccctgcggtcggcgtgaagctgattattatcgatgagttccaacatttggtggaagaaaggtcaaatcgggttcttacccaagtaggtaattggctaaaaatgatacttaacaaaacgaaatgtccaattgttatatttggtatgccatactcaaaagttgtactgcaagcaaactcgcaacttcacgggcgattttccattcaggttgaactgcgcccctttagctaccagggaggtagaggtgtatttaaaacttttttggaataccttgataaagccctaccttttgaaaaacaggctggcttagccaacgaaagtttgcagaaaaaattgtatgcattctctcagggaaacatgcgttcgttgagaaaccttatttatcaagcatctatcgaagcaattgataatcagcatgagacgataaccgaagaagatttcgtttttgcatcgaagttgacatcgggcgataaacccaactcatggaaaaatccttttgaggagggtgttgaggtaacagaagatatgttacgaccgccaccaaaagatattggttgggaggactatttgagacattcaaccccgagagtgagtaaaccaggtagaaataaaaactttttcgaataacctaggctgctgcgctgctgccaccgctgagcaataactagcataaccccttggggcctctaaacgggtcttgaggggttttttgctgaaacctcaggcattgaacctgcacggtaccgagctcgaattcactggccgtcgttttacaacgtcgtgactgggaaaaccctggcgttacccaacttaatcgccttgctatcgtggccggatcttgcggcccctcggcttgaacgaattgttagacattatttgccgactaccttggtgatctcgcctttcacgtagtggacaaattcttccaactgatctgcgcgcgaggccaagcgatcttcttcttgtccaagataagcctgtctagcttcaagtatgacgggctgatactgggccggcaggcgctccattgcccagtcggcagcgacatccttcggcgcgattttgccggttactgcgctgtaccaaatgcgggacaacgtaagcactacatttcgctcatcgccagcccagtcgggcggcgagttccatagcgttaaggtttcatttagcgcctcaaatagatcctgttcaggaaccggatcaaagagttcctccgccgctggacctaccaaggcaacgctatgttctcttgcttttgtcagcaagatagccagatcaatgtcgatcgtggctggctcgaagatacctgcaagaatgtcattgcgctgccattctccaaattgcagttcgcgcttagctggataacgccacggaatgatgtcgtcgtgcacaacaatggtgacttctacagcgcggagaatctcgctctctccaggggaagccgaagtttccaaaaggtcgttgatcaaagctcgccgcgttgtttcatcaagccttacggtcaccgtaaccagcaaatcaatatcactgtgtggcttcaggccgccatccactgcggagccgtacaaatgtacggccagcaacgtcggttcgagatggcgctcgatgacgccaactacctctgatagttgagtcgatacttcggcgatcaccgcttccctcatactcttcctttttcaatattattgaagcatttatcagggttattgtctcatgagcggatacatatttgaatgtatttagaaaaataaacaaatagctagctcactcggtcgctacgctccgggcgtgagactgcggcgg

SEQ ID NO: 5209 - DNA, 2744 bp, synthetic construct
  source 1..2744: mol_type = other DNA
cacatttccccgaaaagtgccacctgacgtcccatgggtatgtgcagctaactctcacatttgttgatacaaccataaaatgataattacacccataaattgataattatcacacccataaattgatattgcctctgatcatagtcagaccaacattgctacgacccgtattcgcaccgacactgctagcagggtcttctctgctacacatggcggccgccgaagctaagtggtttcaccaaaactggtgaaactcacccagggattggctgagacgaaaaacatattctcaataaaccctttagggaaataggccaggttttcaccgtaacacgccacatcttgcgaatatatgtgtagaaactgccggaaatcgtcgtggtattcactccagagcgatgaaaacgtttcagtttgctcatggaaaacggtgtaacaagggtgaacactatcccatatcaccagctcaccgtctttcattgccatacggaactccggatgagcattcatcaggcgggcaagaatgtgaataaaggccggataaaacttgtgcttatttttctttacggtctttaaaaaggccgtaatatccagctgaacggtctggttataggtacattgagcaactgactggcatgtttcccttgtagtgggcgcgcccatgtgtagcagagaagaccctgctagcagtgtcggtgcgaatacgggtcgtagcaatgttggtctgactatgatcagaggcaatatcaatttatgggtgtgataattatcaatttatgggtgtaattatcattttatggttgtatcaacaaatgtgagagttagctgcacatacgctcttccgcttcctcgctcactgactcgctgcgctcggtcgttcggctgcggcgagcggtatcagctcactcaaaggcggtaatacggttatccacagaatcaggggataacgcaggaaagaacatgtgagcaaaaggccagcaaaaggccaggaaccgtaaaaaggccgcgttgctggcgtttttccataggctccgcccccctgacgagcatcacaaaaatcgacgctcaagtcagaggtggcgaaacccgacaggactataaagataccaggcgtttccccctggaagctccctcgtgcgctctcctgttccgaccctgccgcttaccggatacctgtccgcctttctcccttcgggaagcgtggcgctttctcatagctcacgctgtaggtatctcagttcggtgtaggtcgttcgctccaagctgggctgtgtgcacgaaccccccgttcagcccgaccgctgcgccttatccggtaactatcgtcttgagtccaacccggtaagacacgacttatcgccactggcagcagccactggtaacaggattagcagagcgaggtatgtaggcggtgctacagagttcttgaagtggtggcctaactacggctacactagaagaacagtatttggtatctgcgctctgctgaagccagttaccttcggaaaaagagttggtagctcttgatccggcaaacaaaccaccgctggtagcggtggtttttttgtttgcaagcagcagattacgcgcagaaaaaaaggatctcaagaagatcctttgatcttttctacggggtctgacgctcagtggaacgaaaactcacgttaagggattttggtcatgagattatcaaaaaggatcttcacctagatccttttaaattaaaaatgaagttttaaatcaatctaaagtatatatgagtaaacttggtctgacagttaccaatgcttaatcagtgaggcacctatctcagcgatctgtctatttcgttcatccatagttgcctgactccccgtcgtgtagataactacgatacgggagggcttaccatctggccccagtgctgcaatgataccgcgagacccacgctcaccggctccagatttatcagcaataaaccagccagccggaagggccgagcgcagaagtggtcctgcaactttatccgcctccatccagtctattaattgttgccgggaagctagagtaagtagttcgccagttaatagtttgcgcaacgttgttgccattgctacaggcatcgtggtgtcacgctcgtcgtttggtatggcttcattcagctccggttcccaacgatcaaggcgagttacatgatcccccatgttgtgcaaaaaagcggttagctccttcggtcctccgatcgttgtcagaagtaagttggccgcagtgttatcactcatggttatggcagcactgcataattctcttactgtcatgccatccgtaagatgcttttctgtgactggtgagtactcaaccaagtcattctgagaatagtgtatgcggcgaccgagttgctcttgcccggcgtcaatacgggataataccgcgccacatagcagaactttaaaagtgctcatcattggaaaacgttcttcggggcgaaaactctcaaggatcttaccgctgttgagatccagttcgatgtaacccactcgtgcacccaactgatcttcagcatcttttactttcaccagcgtttctgggtgagcaaaaacaggaaggcaaaatgccgcaaaaaagggaataagggcgacacggaaatgttgaatactcatactcttcctttttcaatattattgaagcatttatcagggttattgtctcatgagcggatacatatttgaatgtatttagaaaaataaacaaataggggttccgcg

SEQ ID NO: 5210 - DNA, 2794 bp, synthetic construct
  source 1..2794: mol_type = other DNA
cacatttccccgaaaagtgccacctgacgtcccatggtgaagctcgcattacagtgaatgttgttgatgcaaccataaagtgatatttaataattatttataatcagcaacttaaccacaaaacaaccatatattgatatctcacaaaacaaccataagttgatatttttgtgaatcgagtatttcagcaaaactactgcagtaagaattggtcatcacttactgcgtgtcagagaggcggccgccgaagctaagtggtttcaccaaaactggtgaaactcacccagggattggctgagacgaaaaacatattctcaataaaccctttagggaaataggccaggttttcaccgtaacacgccacatcttgcgaatatatgtgtagaaactgccggaaatcgtcgtggtattcactccagagcgatgaaaacgtttcagtttgctcatggaaaacggtgtaacaagggtgaacactatcccatatcaccagctcaccgtctttcattgccatacggaactccggatgagcattcatcaggcgggcaagaatgtgaataaaggccggataaaacttgtgcttatttttctttacggtctttaaaaaggccgtaatatccagctgaacggtctggttataggtacattgagcaactgactggcatgtttcccttgtagtgggcgcgccctctctgacacgcagtaagtgatgaccaattcttactgcagtagttttgctgaaatactcgattcacaaaaatatcaacttatggttgttttgtgagatatcaatatatggttgttttgtggttaagttgctgattataaataattattaaatatcactttatggttgcatcaacaacattcactgtaatgcgagcttcagctcttccgcttcctcgctcactgactcgctgcgctcggtcgttcggctgcggcgagcggtatcagctcactcaaaggcggtaatacggttatccacagaatcaggggataacgcaggaaagaacatgtgagcaaaaggccagcaaaaggccaggaaccgtaaaaaggccgcgttgctggcgtttttccataggctccgcccccctgacgagcatcacaaaaatcgacgctcaagtcagaggtggcgaaacccgacaggactataaagataccaggcgtttccccctggaagctccctcgtgcgctctcctgttccgaccctgccgcttaccggatacctgtccgcctttctcccttcgggaagcgtggcgctttctcatagctcacgctgtaggtatctcagttcggtgtaggtcgttcgctccaagctgggctgtgtgcacgaaccccccgttcagcccgaccgctgcgccttatccggtaactatcgtcttgagtccaacccggtaagacacgacttatcgccactggcagcagccactggtaacaggattagcagagcgaggtatgtaggcggtgctacagagttcttgaagtggtggcctaactacggctacactagaagaacagtatttggtatctgcgctctgctgaagccagttaccttcggaaaaagagttggtagctcttgatccggcaaacaaaccaccgctggtagcggtggtttttttgtttgcaagcagcagattacgcgcagaaaaaaaggatctcaagaagatcctttgatcttttctacggggtctgacgctcagtggaacgaaaactcacgttaagggattttggtcatgagattatcaaaaaggatcttcacctagatccttttaaattaaaaatgaagttttaaatcaatctaaagtatatatgagtaaacttggtctgacagttaccaatgcttaatcagtgaggcacctatctcagcgatctgtctatttcgttcatccatagttgcctgactccccgtcgtgtagataactacgatacgggagggcttaccatctggccccagtgctgcaatgataccgcgagacccacgctcaccggctccagatttatcagcaataaaccagccagccggaagggccgagcgcagaagtggtcctgcaactttatccgcctccatccagtctattaattgttgccgggaagctagagtaagtagttcgccagttaatagtttgcgcaacgttgttgccattgctacaggcatcgtggtgtcacgctcgtcgtttggtatggcttcattcagctccggttcccaacgatcaaggcgagttacatgatcccccatgttgtgcaaaaaagcggttagctccttcggtcctccgatcgttgtcagaagtaagttggccgcagtgttatcactcatggttatggcagcactgcataattctcttactgtcatgccatccgtaagatgcttttctgtgactggtgagtactcaaccaagtcattctgagaatagtgtatgcggcgaccgagttgctcttgcccggcgtcaatacgggataataccgcgccacatagcagaactttaaaagtgctcatcattggaaaacgttcttcggggcgaaaactctcaaggatcttaccgctgttgagatccagttcgatgtaacccactcgtgcacccaactgatcttcagcatcttttactttcaccagcgtttctgggtgagcaaaaacaggaaggcaaaatgccgcaaaaaagggaataagggcgacacggaaatgttgaatactcatactcttcctttttcaatattattgaagcatttatcagggttattgtctcatgagcggatacatatttgaatgtatttagaaaaataaacaaataggggttccgcg

SEQ ID NO: 5211 - DNA, 11073 bp, synthetic construct
  source 1..11073: mol_type = other DNA
aacgtggctggcctggttcaccacgcgggaaacggtctgataagagacaccggcatactctgcgacatcgtataacgttactggtttcacattcaccaccctgaattgactctcttccgggcgctatcatgccataccgcgaaaggttttgcgccattcgatggtgtccgggatctcgacgctctcccttatgcgactcctgcattaggaatggataaccgtattaccgcctttgagtgagctgataccgctcgccgcagccgaacgaccgagcgcagcgagtcagtgagcgaggacacaagctttgacagctagctcagtcctaggtataatactagcgtcgactttaataaggagatataccatggctaaagcaaactcttcattttctgaagtgcaaattgcccgtcgtattaaagaggggcgtggccaagggcatggtaaagactatattccatggctaacagtacaagaagttccttcttcaggtcgttcccaccgtatttattctcataagacgggacgagtccatcatttgctatctgacttagagcttgctgtttttctcagtcttgagtgggagagcagcgtgctagatatacgcgagcagttccccttattacctagtgataccaggcagattgcaatagatagtggtattaagcatcctgttattcgtggtgtagatcaggttatgtctactgattttttagtggactgcaaagatggtccttttgagcagtttgctattcaagtcaaacctgcagcagccttacaagacgagcgtaccttagaaaaactagaactagagcgtcgctattggcagcaaaagcaaattccttggttcatttttactgataaagaaataaatcccgtagtaaaagaaaatattgaatggctttattcagtgaaaacagaagaagtttctgcggagcttttagcacaactatccccattggcccatatcctgcaagaaaaaggagatgaaaacattatcaatgtctgtaagcaggttgatattgcttatgatttggagttaggcaaaacattgagtgagatacgagccttaaccgcaaatggttttattaagttcaatatttataagtctttcagggcaaataagtgtgcagatctctgtattagccaagtagtgaatatggaggagttgcgctatgtggcaaattaatgaggttgtgctatttgataatgatccgtatcgcattttggctatagaggatggccaagttgtctggatgcaaataagcgctgataaaggagttccacaagctagggctgagttgttgctaatgcagtatttagatgaaggccgcttagttagaactgatgacccttatgtacatcttgatttagaagagccgtctgtagattctgtcagcttccagaagcgcgaggaggattatcgaaaaattcttcctattattaatagtaaggatcgtttcgaccctaaagtcagaagcgaactcgttgagcatgtggtccaagaacataaggttactaaggctacagtttataagttgttacgccgttactggcagcgtggtcaaacgcctaatgcattaattcctgactacaaaaacagcggtgcaccaggggaaagacgttcagcgacaggaacagcaaagattggccgagccagagaatatggtaagggtgaaggaaccaaggtaacgcccgagattgaacgcctttttaggttgaccatagaaaagcacctgttaaatcaaaaaggtacaaagaccaccgttgcctatagacgatttgtggacttgtttgctcagtattttcctcgcattccccaagaggattacccaacactacgtcagtttcgttatttttatgatcgagaataccctaaagctcagcgcttaaagtctagagttaaagcaggggtatataaaaaagacgtacgacccttaagtagtacagccacttctcaggcgttaggccctgggagtcgttatgagattgatgccacgattgctgatatttatttagtggatcatcatgatcgccaaaaaatcataggaagaccaacgctttacattgtgattgatgtgtttagtcggatgatcacgggcttttatatcggctttgaaaatccgtcttatgtggtggcgatgcaggcttttgtaaatgcttgctctgacaaaacggccatttgtgcccagcatgatattgagattagtagctcagactggccgtgtgtaggtttgccagatgtgttgctagcggaccgtggcgaattaatgagtcatcaggtcgaagccttagtttctagttttaatgtgcgagtggaaagtgctccacctagacgtggcgatgctaaaggcatagtggaaagcacttttagaacactacaagccgagtttaagtcctttgcacctggcattgtagagggcagtcggatcaaaagccatggtgaaacagactataggttagatgcatctctgtcggtatttgagttcacacaaattattttgcgtacgatcttattcagaaataaccatctggtgatggataaatacgatcgagatgctgattttcctacagatttaccgtctattcctgtccagctatggcaatggggtatgcagcatcgtacaggtagtttaagggctgtggagcaagagcagttgcgagtagcgttactgcctcgccgaaaggtctctatttcttcatttggcgttaatttgtggggtttgtattactcggggtcagagattctgcgtgagggttggttgcagcggagcactgatatagctagacctcaacatttagaagcggcttatgacccagtgctggttgatacgatttatttgtttccgcaagttggcagccgtgtattttggcgctgtaatctgacggaacgtagtcggcagtttaaaggtctctcattttgggaggtttgggatatacaagcacaagaaaaacacaataaagccaatgcgaagcaggatgagttaactaaacgcagggagcttgaggcgtttattcagcaaaccattcagaaagcgaataagttaacgcccagtactactgagcccaaatcaacacgcattaagcagattaaaactaataaaaaagaagccgtgacctcggagcgtaaaaaacgtgcggagcatttgaagccaagctcttcaggtgatgaggctaaagttattcctttcaacgcagtggaagcggatgatcaagaagattacagcctacccacatacgtgcctgaattatttcaggatccaccagaaaaggatgagtcatgagtgctacccggattcaagcagtttatcgtgatacgggggtagaggcttatcgtgataatccttttatcgaggccttaccaccattacaagagtcagtgaatagtgctgcatcactgaaatcctctttacagcttacttcctctgacttgcaaaagtcccgtgttatcagagctcataccatttgtcgtattccagatgactattttcagccattaggtacgcatttgctactaagtgagcgtatttcggtcatgattcgaggtggctacgtaggcagaaatcctaaaacaggagatttacaaaagcatttacaaaatggttatgagcgtgttcaaacgggagagttggagacatttcgctttgaggaggcacgatctacggcacaaagcttattgttaattggttgttctggtagtgggaagacgacctctcttcatcgtattctagccacgtatcctcaggtgatttaccatcgtgaactcaatgtagagcaggtggtgtatttgaaaatagactgctcgcataatggttcgctaaaagaaatctgcttgaattttttcagagcgttggatcgagccttgggctcgaactatgagcgtcgttatggcttaaaacgtcatggtatagaaaccatgttggctttgatgtcgcaaatagccaatgcacatgctttagggttgttggttattgatgaaattcagcatttaagccgctctcgttcgggtggatctcaagagatgctgaacttttttgtgacgatggtgaatattattggcgtaccagtgatgttgattggtacccctaaagcacgagagatttttgaggctgatttgcggtctgcacgtagaggggcagggtttggagctatattctgggatcctatacaacaaacgcaacgtggaaagcccaatcaagagtggatcgcttttacggataatctttggcaattacagcttttacaacgcaaagatgcgctgttatcggatgaggtccgtgatgtgtggtatgagctaagccaaggagtgatggacattgtagtaaaactttttgtactcgctcagctccgtgcgctagctttaggcaatgagcgtattaccgctggtttattgcggcaagtgtatcaagatgagttaaagcctgtgcaccccatgctagaggcattacgctcgggtatcccagaacgcattgctcgttattctgatctagtcgttcccgagattgataaacggttaatccaacttcagctagatatcgcagcgatacaagaacaaacaccagaagaaaaagcccttcaagagttagataccgaagatcagcgtcatttatatctgatgctgaaagaggattacgattcaagcctgttaattcccactattaaaaaagcgtttagccagaatccaacgatgacaagacaaaagttactgcctcttgttttgcagtggttgatggaaggcgaaacggtagtgtcagaactagaaaagccctccaagagtaaaaaggtttcggctataaaggtagtcaagcccagcgactgggatagcttgcctgatacggatttacgttatatctattcacaacgccaacctgaaaaaaccatgcatgaacggttaaaagggaaaggggtaatagtggatatggcgagcttatttaaacaagcaggttagccatgagaaactttcctgttccgtactcgaatgagctgatttatagcactattgcacgggcaggcgtttatcaagggattgttagtcctaagcagctgttggatgaggtgtatggcaaccgcaaggtggtcgctaccttaggtctgccctcgcatttaggtgtgatagcaagacatctacatcaaacaggacgttacgctgttcagcagcttatttatgagcataccttattccctttatatgctccgtttgtaggcaaggagcgccgagacgaagctattcggttaatggagtaccaagcgcaaggtgcggtgcatttaatgctaggagtcgctgcttctagagttaagagcgataaccgctttagatactgccctgattgcgttgctcttcagctaaataggtatggggaagccttttggcaacgagattggtatttgcccgctttgccatattgtccaaaacacggtgctttagtcttctttgatagagctgtagatgatcaccgacatcaattttgggctttgggtcatactgagctgctttcagactaccccaaagactccctatctcaattaacagcactagctgcttatatagcccctctgttagatgctccacgagcgcaagagctttccccaagccttgagcagtggacgctgttttatcagcgcttagcgcaggatctagggctaaccaaaagcaagcacattcgtcatgacttggtggcggagagagtgaggcagacttttagtgatgaggcactagagaaactggatttaaagttggcagagaacaaggacacgtgttggctgaaaagtatattccgtaagcatagaaaagcctttagttatttacagcatagtattgtgtggcaagccttattgccaaaactaacggttatagaagcgctacagcaggcaagtgctcttactgagcactctataacgacaagacctgttagccagtctgtgcaacctaactctgaagatttatctgttaagcataaagactggcagcaactagtgcataaataccaaggaattaaggcggcaagacagtctttagagggtggggtgctatacgcttggctttaccgacatgacagggattggctagttcactggaatcaacagcatcaacaagagcgtctggcacccgcccctagagttgattggaaccaaagagatcgaattgctgtacgacaactattaagaatcataaagcgtctagatagtagccttgatcacccaagagcgacatcgagctggctgttaaagcaaactcctaacggaacctctcttgcaaaaaatctacagaaactgcctttggtagcgctttgcttaaagcgttactcagagagtgtggaagattatcaaattagacggattagccaagcttttattaagcttaaacaggaagatgttgagcttaggcgctggcgattattaagaagtgcaacgttatctaaagagcggataactgaggaagcacaaagattcttggaaatggtttatggggaagagtgacctaggctgctgccaccgctgagcaataactagcataaccccttggggcctctaaacgggtcttgaggggttttttgctgaaacctcaggcatttgagaagcacacggccatgattacgccaagctttgtgggcggacaataaagtcttaaactgaacaaaatagatctaaactatgacaataaagtcttaaactagacagaatagttgtaaactgaatcaggtcgaggtggcccggctccatgcaccgcgacgcaacgcggggaggcagacaaggtatagggcggcgcctacaatccatgccaacccgttccatgtgctcgccgaggcggcataaatcgccgtgacgatcagcggtccagtgatcgaagtcgtagccaacaaacaatgcagcgatccttgaagctgtccctgatggtcgtcatctacctgcctggacagcatggcctgcaacgcgggcatcccgatgccgccggaagcgagaagaatcataatggggaaggccatccagcctcgcgtcgcgaacgccagcaagacgtagcccagcgcgtcggccgccatgccggcgataatggcctgcttctcgccgaaacgtttggtggcgggaccagtgacgaaggcttgagcgagggcgtgcaagattccgaataccgcaagcgacaggccgatcatcgtcgcgctccagcgaaagcggtcctcgccgaaaatgacccagagcgctgccggcacctgtcctacgagttgcatgataaagaagacagtcataagtgcggcgacgatagtcatgccccgcgcccaccggaaggagctgactgggttgaaggctctcaagggcatcggtcgacgctctcccttatgcgactcctgcattaggaagcagcccagtagtaggttgaggccgttgagcaccgccgccgcaaggaatggtgcatgcaaggagatggcgcccaacagtcccccggccacggggcctgccaccatacccacgccgaaacaagcgctcatgagcccgaagtggcgagcccgatcttccccatcggtgatgtcggcgatataggcgccagcaaccgcacctgtggcgccggtgatgccggccacgatgcgtccggcgtagaggatccacaggacgggtgtggtcgccatgatcgcgtagtcgatagtggctccaagtagcgaagcgagcaggactgggcggcggccaaagcggtcggacagtgctccgagaacgggtgcgcatagaaattgcatcaacgcatatagcgctagcagcacgccatagtgactggcgatgctgtcggaatggacgatatcccgcaagaggcccggcagtagcattgtttgttggctacgacctacagcatccagggtgacggtgccgaggatgacgatgagcgcattgttagatttcatatgtatatctccttagttaaccagataagtgaaatctagttccaaactattttgtcatttttaattttcgtattagcttacgacgctacacccagttcccatctattttgtcactcttccctaaataatccttaaaaactccatttccacccctcccagttcccaactattttgtccgcccacaggtaccgagctcgaattccactggccgtcgttttacaacgtcgtgactgggaaaaccctggcgttacccaacttaatcgccttgctatcgtggccggatcttgcggcccctcggcttgaacgaattgttagacattatttgccgactaccttggtgatctcgcctttcacgtagtggacaaattcttccaactgatctgcgcgcgaggccaagcgatcttcttcttgtccaagataagcctgtctagcttcaagtatgacgggctgatactgggccggcaggcgctccattgcccagtcggcagcgacatccttcggcgcgattttgccggttactgcgctgtaccaaatgcgggacaacgtaagcactacatttcgctcatcgccagcccagtcgggcggcgagttccatagcgttaaggtttcatttagcgcctcaaatagatcctgttcaggaaccggatcaaagagttcctccgccgctggacctaccaaggcaacgctatgttctcttgcttttgtcagcaagatagccagatcaatgtcgatcgtggctggctcgaagatacctgcaagaatgtcattgcgctgccattctccaaattgcagttcgcgcttagctggataacgccacggaatgatgtcgtcgtgcacaacaatggtgacttctacagcgcggagaatctcgctctctccaggggaagccgaagtttccaaaaggtcgttgatcaaagctcgccgcgttgtttcatcaagccttacggtcaccgtaaccagcaaatcaatatcactgtgtggcttcaggccgccatccactgcggagccgtacaaatgtacggccagcaacgtcggttcgagatggcgctcgatgacgccaactacctctgatagttgagtcgatacttcggcgatcaccgcttccctcatactcttcctttttcaatattattgaagcatttatcagggttattgtctcatgagcggatacatatttgaatgtatttagaaaaataaacaaatagctagctcactcggtcgctacgctccgggcgtgagactgcggcgggcgctgcggacacatacaaagttacccacagattccgtggataagcaggggactaacatgtgaggcaaaacagcagggccgcgccggtggcgtttttccataggctccgccctcctgccagagttcacataaacagacgcttttccggtgcatctgtgggagccgtgaggctcaaccatgaatctgacagtacgggcgaaacccgacaggacttaaagatccccaccgtttccggcgggtcgctccctcttgcgctctcctgttccgaccctgccgtttaccggatacctgttccgcctttctcccttacgggaagtgtggcgctttctcatagctcacacactggtatctcggctcggtgtaggtcgttcgctccaagctgggctgtaagcaagaactccccgttcagcccgactgctgcgccttatccggtaactgttcacttgagtccaacccggaaaagcacggtaaaacgccactggcagcagccattggtaactgggagttcgcagaggatttgtttagctaaacacgcggttgctcttgaagtgtgcgccaaagtccggctacactggaaggacagatttggttgctgtgctctgcgaaagccagttaccacggttaagcagttccccaactgacttaaccttcgatcaaaccacctccccaggtggttttttcgtttacagggcaaaagattacgcgcagaaaaaaaggatctcaagaagatcctttgatcttttctactgaaccgctctagatttcagtgcaatttatctcttcaaatgtagcacctgaagtcagccccatacgatataagttgtaattctcatgttagtcatgccccgcgcccaccggaaggagctgactgggttgaaggctctcaagggcatcggtcgagatcccggtgcctaatgagtgagctaacttacattaattgcgttgcgctcactgcccgctttccagtcgggaaacctgtcgtgccagctgcattaatgaatcggccaacgcgcggggagaggcggtttgcgtattgggcgccagggtggtttttcttttcaccagtgagacgggcaacagctgattgcccttcaccgcctggccctgagagagttgcagcaagcggtccacgctggtttgccccagcaggcgaaaatcctgtttgatggtggttaacggcgggatataacatgagctgtcttcggtatcgtcgtatcccactaccgagatgtccgcaccaacgcgcagcccggactcggtaatggcgcgcattgcgcccagcgccatctgatcgttggcaaccagcatcgcagtgggaacgatgccctcattcagcatttgcatggtttgttgaaaaccggacatggcactccagtcgccttcccgttccgctatcggctgaatttgattgcgagtgagatatttatgccagccagccagacgcagacgcgccgagacagaacttaatgggcccgctaacagcgcgatttgctggtgacccaatgcgaccagatgctccacgcccagtcgcgtaccgtcttcatgggagaaaataatactgttgatgggtgtctggtcagagacatcaagaaataacgccggaacattagtgcaggcagcttccacagcaatggcatcctggtcatccagcggatagttaatgatcagcccactgacgcgttgcgcgagaagattgtgcaccgccgctttacaggcttcgacgccgcttcgttctaccatcgacaccaccacgctggcacccagttgatcggcgcgagatttaatcgccgcgacaatttgcgacggcgcgtgcagggccagactggaggtggcaacgccaatcagcaacgactgtttgcccgccagttgttgtgccacgcggttgggaatgtaattcagctccgccatcgccgcttccactttttcccgcgttttcgcaga

SEQ ID NO: 5212 - DNA, 3660 bp, synthetic construct
  source 1..3660: mol_type = other DNA
taaaggcttaagtagcaccctcgcaagctcgggcaaatcgctgaatattccttttgtctccgaccatcaggcacctgagtcgctgtctttttcgtgacattcagttcgctgcgctcacggctctggcagtgaatgggggtaaatggcactacaggcgccttttatggattcatgcaaggaaactacccataatacaagaaaagcccgtcacgggcttctcagggcgttttatggcgggtctgctatgtggtgctatctgactttttgctgttcagcagttcctgccctctgattttccagtctgaccacttcggattatcccgtgacaggtcattcagactggctaatgcacccagtaaggcagcggtatcatcaacaggcttacccgtcttactgtccctagtgcttggattctcaccaataaaaaacgcccggcggcaaccgagcgttctgaacaaatccagatggagttctgaggtcattactggatctatcaacaggagtccaagcgagctctcgaaccccagagtcccgctcagaagaactcgtcaagaaggcgatagaaggcgatgcgctgcgaatcgggagcggcgataccgtaaagcacgaggaagcggtcagcccattcgccgccaagctcttcagcaatatcacgggtagccaacgctatgtcctgatagcggtccgccacacccagccggccacagtcgatgaatccagaaaagcggccattttccaccatgatattcggcaagcaggcatcgccatgggtcacgacgagatcctcgccgtcgggcatgcgcgccttgagcctggcgaacagttcggctggcgcgagcccctgatgctcttcgtccagatcatcctgatcgacaagaccggcttccatccgagtacgtgctcgctcgatgcgatgtttcgcttggtggtcgaatgggcaggtagccggatcaagcgtatgcagccgccgcattgcatcagccatgatggatactttctcggcaggagcaaggtgagatgacaggagatcctgccccggcacttcgcccaatagcagccagtcccttcccgcttcagtgacaacgtcgagcacagctgcgcaaggaacgcccgtcgtggccagccacgatagccgcgctgcctcgtcctgcagttcattcagggcaccggacaggtcggtcttgacaaaaagaaccgggcgcccctgcgctgacagccggaacacggcggcatcagagcagccgattgtctgttgtgcccagtcatagccgaatagcctctccacccaagcggccggagaacctgcgtgcaatccatcttgttcaatcatactcttcctttttcaatattattgaagcatttatcagggttattgtctcatgagcggatacatatttgaatgtatttagaaaaataaacaaataggggttccgcgcacatttccccgaaaagtgccacctgacgtctaagaaaccattattatcatgacattaacctataaaaataggcgtatcacgaggcagaatttcagataaaaaaaatccttagctttcgctaaggatgatttctggaattctaaagcccctttgacagctagcgatataccatgggcagcagccatcaccatcatcaccacagccaggatccgaattcgagctcggcgcgcctgcaggtcgacaagcttgcggccgcataatgcttaagtcgaacagaaagtaatcgtattgtacacggccgcataatcgaaattaatacgactcactataggggaattgtgagcggataacaattccccatcttagtatattagttaagtataagaaggagatatacatatggcagatctcaattggatatcggccggccacgcgatcgctgacgtcggtaccctcgagtctggtaaagaaaccgctgctgcgaaatttgaacgccagcacatggactcgtctactagcgcagcttaattaacctaggtataatactagttgagaccagtgactactggtctcagttttagagctagaaatagcaagttaaaataaggctagtccgttatcaacttgaaaaagtggcaccgagtcggtgctttttttataaaacgaaaggctcagtcgaaagactgggcctttcgttttatccgaatacgggttcttgcatgttacattgtcgatctgttcatggtgaacagctttaaatgcaccaaaaactcgtaaaagctctgatgtatctatcttttttacaccgttttcatctgtgcatatggacagttttccctttgatatctaacggtgaacagttgttctacttttgtttgttagtcttgatgcttcactgatagatacaagagccataagaacctcagatccttccgtatttagccagtatgttctctagtgtggttcgttgtttttgcgtgagccatgagaacgaaccattgagatcatgcttactttgcatgtcactcaaaaattttgcctcaaaactggtgagctgaatttttgcagttaaagcatcgtgtagtgtttttcttagtccgttacgtaggtaggaatctgatgtaatggttgttggtattttgtcaccattcatttttatctggttgttctcaagttcggttacgagatccatttgtctatctagttcaacttggaaaatcaacgtatcagtcgggcggcctcgcttatcaaccaccaatttcatattgctgtaagtgtttaaatctttacttattggtttcaaaacccattggttaagccttttaaactcatggtagttattttcaagcattaacatgaacttaaattcatcaaggctaatctctatatttgccttgtgagttttcttttgtgttagttcttttaataaccactcataaatcctcatagagtatttgttttcaaaagacttaacatgttccagattatattttatgaatttttttaactggaaaagataaggcaatatctcttcactaaaaactaattctaatttttcgcttgagaacttggcatagtttgtccactggaaaatctcaaagcctttaaccaaaggattcctgatttccacagttctcgtcatcagctctctggttgctttagctaatacaccataagcattttccctactgatgttcatcatctgagcgtattggttataagtgaacgataccgtccgttctttccttgtagggttttcaatcgtggggttgagtagtgccacacagcataaaattagcttggtttcatgctccgttaagtcatagcgactaatcgctagttcatttgctttgaaaacaactaattcagacatacatctcaattggtctaggtgattttaatcactataccaattgagatgggctagtcaatgataattactagtccttttcccgggagatctgggtatctgtaaattctgctagacctttgctggaaaacttgtaaattctgctagaccctctgtaaattccgctagacctttgtgtgttttttttgtttatattcaagtggttataatttatagaataaagaaagaataaaaaaagataaaaagaatagatcccagccctgtgtataactcactactttagtcagttccgcagtattacaaaaggatgtcgcaaacgctgtttgctcctctacaaaacagaccttaaaaccc

SEQ ID NO: 5213 - DNA, 6716 bp, synthetic construct
  source 1..6716: mol_type = other DNA
cagctgtctcttatacacatctccgctgtgctttcagtggatttcggataacagaaaggccgggaaatacccagcctcgctttgtaacggagtagacgaaagtgattgcgcctacccggatattatcgtgaggatgcgtcatcgccattgctccccaaatacaaaaccaatttcagccagtgcctcgtccattttttcgatgaactccggcacgatctcgtcaaaactcgccatgtacttttcatcccgctcaatcacgacataatgcaggccttcacgcttcatacgcgggtcatagttggcaaagtaccaggcattttttcgcgtcacccacatgctgtactgcacctgggccatgtaagctgactttatggcctcgaaaccaccgagccggaacttcatgaaatcccgggaggtaaacgggcatttcagttcaaggccgttgccgtcactgcataaaccatcgggagagcaggcggtacgcatactttcgtcgcgatagatgatcggggattcagtaacattcacgccggaagtgaactcaaacagggttctggcgtcgttctcgtactgttttccccaggccagtgctttagcgttaacttccggagccacaccggtgcaaacctcagcaagcagggtgtggaagtaggacattttcatgtcaggccacttctttccggagcggggttttgctatcacgttgtgaacttctgaagcggtgatgacgccgagccgtaatttgtgccacgcatcatccccctgttcgacagctctcacatcgatcccggtacgctgcaggataatgtccggtgtcatgctgccaccttctgctctgcggctttctgtttcaggaatccaagagcttttactgcttcggcctgtgtcagttctgacgatgcacgaatgtcgcggcgaaatatctgggaacagagcggcaataagtcgtcatcccatgttttatccagggcgatcagcagagtgttaatctcctgcatggtttcatcgttaaccggagtgatgtcgcgttccggctgacgttctgcagtgtatgcagtattttcgacaatgcgctcggcttcatccttgtcatagataccagcaaatccgaaggccagacgggcacactgaatcatggctttatgacgtaacatccgtttgggatgcgactgccacggccccgtgatttctctgccttcgcgagttttgaatggttcgcggcggcattcatccatccattcggtaacgcagatcggatgattacggtccttgcggtaaatccggcatgtacaggattcattgtcctgctcaaagtccatgccatcaaactgctggttttcattgatgatgcgggaccagccatcaacgcccaccaccggaacgatgccattctgcttatcaggaaaggcgtaaatttctttcgtccacggattaaggccgtactggttggcaacgatcagtaatgcgatgaactgcgcatcgctggcatcacctttaaatgccgtctggcgaagagtggtgatcagttcctgtgggtcgacagaatccatgccgacacgttcagccagcttcccagccagcgttgcgagtgcagtactcattcgttttatacctctgaatcaatatcaacctggtggtgagcaatggtttcaaccatgtaccggatgtgttctgccatgcgctcctgaaactcaacatcgtcatcaaacgcacgggtaatggattttttgctggccccgtggcgttgcaaatgatcgatgcatagcgattcaaacaggtgctggggcaggcctttttccatgtcgtctgccagttctgcctctttctcttcacgggcgagctgctggtagtgacgcgcccagctctgagcctcaagacgatcctgaatgtaataagcgttcatggctgaactcctgaaatagctgtgaaaatatcgcccgcgaaatgccgggctgattagtaatccggaatcgcacttacggccaatgcttcgtttcgtatcacacaccccaaagccttctgctttgaatgctgcccttcttcagggcttaatttttaagagcgtcaccttcatggtggtcagtgcgtcctgctgatgtgctcagtatcaccgccagtggtatttatgtcaacaccgccagagataatttatcaccgcagatggttatctgtatgttttttatatgaatttattttttgcaggggggcattgtttggtaggtgagagatctgaattgctatgtttagtgagttgtatctatttatttttcaataaatacaattggttatgtgttttgggggcgatcgtgaggcaaagaaaacccggcgctgaggccgggttaagagttggtagctcttgatccggcaaacaaaccaccgctggtagcggtggtttttttgtttgcaagcagcagattacgcgcagaaaaaaaggatctcaagaagatcctttgatcttttctacggggtctgacgctcagtggaacgaaaactcacgttaagggattttggtcatgagattatcaaaaaggatcttcacctagatccttttaaattaaaaatgaagttttaaatcaatctaaagtatatatgagtaaacttggtctgacagttaccaatgcttaatcagtgaggcacctatctcagcgatctgtctatttcgttcatccatagttgcctgactccccgtcgtgtagataactacgatacgggagggcttaccatctggccccagtgctgcaatgataccgcgagacccacgctcaccggctccagatttatcagcaataaaccagccagccggaagggccgagcgcagaagtggtcctgcaactttatccgcctccatccagtctattaattgttgccgggaagctagagtaagtagttcgccagttaatagtttgcgcaacgttgttgccattgctgcaggcatcgtggtgtcacgctcgtcgtttggtatggcttcattcagctccggttcccaacgatcaaggcgagttacatgatcccccatgttgtgcaaaaaagcggttagctccttcggtcctccgatcgttgtcagaagtaagttggccgcagtgttatcactcatggttatggcagcactgcataattctcttactgtcatgccatccgtaagatgcttttctgtgactggtgagtactcaaccaagtcattctgagaatagtgtatgcggcgaccgagttgctcttgcccggcgtcaacacgggataataccgcgccacatagcagaactttaaaagtgctcatcattggaaaacgttcttcggggcgaaaactctcaaggatcttaccgctgttgagatccagttcgatgtaacccactcgtgcacccaactgatcttcagcatcttttactttcaccagcgtttctgggtgagcaaaaacaggaaggcaaaatgccgcaaaaaagggaataagggcgacacggaaatgttgaatactcatactcttcctttttcaatattattgaagcatttatcagggttattgtctcatgagcggatacatatttgaatgaattcaatccatttactatgttatgttctgaggggagtgaaaattcccctaattcgatgaagattcttgctcaattgttatcagctatgcgccgaccagaacaccttgccgatcagccaaacgtctcttcaggccactgactagcgataactttccccacaacggaacaactctcattgcatgggatcattgggtactgtgggtttagtggttgtaaaaacacctgaccgctatccctgatcagtttcttgaaggtaaactcatcacccccaagtctggctatgcagaaatcacctggctcaacagcctgctcagggtcaacgagaattaacattccgtcaggaaagcttggcttggagcctgttggtgcggtcatggaattaccttcaacctcaagccagaatgcagaatcactggcttttttggttgtgcttacccatctctccgcatcacctttggtaaaggttctaagcttaggtgagaacatccctgcctgaacatgagaaaaaacagggtactcatactcacttctaagtgacggctgcatactaaccgcttcatacatctcgtagatttctctggcgattgaagggctaaattcttcaacgctaactttgagaatttttgtaagcaatgcggcgttataagcatttaatgcattgatgccattaaataaagcaccaacgcctgactgccccatccccatcttgtctgcgacagattcctgggataagccaagttcatttttctttttttcataaattgctttaaggcgacgtgcgtcctcaagctgctcttgtgttaatggtttcttttttgtgctcatacgttaaatctatcaccgcaagggataaatatctaacaccgtgcgtgttgactattttacctctggcggtgataatggttgcatgtactaaggaggttgtatggaacaacgagatgtgtataagagacagctgacgggttttgctgcccgcaaacgggctgttctggtgttgctagtttgttatcagaatcgcagatccggcttcaggtttgccggctgaaagcgctatttcttccagaattgccatgattttttccccacgggaggcgtcactggctcccgtgttgtcggcagctttgattcgataagcagcatcgcctgtttcaggctgtctatgtgtgactgttgagctgtaacaagttgtctcaggtgttcaatttcatgttctagttgctttgttttactggtttcacctgttctattaggtgttacatgctgttcatctgttacattgtcgatctgttcatggtgaacagctttgaatgcaccaaaaactcgtaaaagctctgatgtatctatcttttttacaccgttttcatctgtgcatatggacagttttccctttgatatgtaacggtgaacagttgttctacttttgtttgttagtcttgatgcttcactgatagatacaagagccataagaacctcagatccttccgtatttagccagtatgttctctagtgtggttcgttgtttttgcgtgagccatgagaacgaaccattgagatcatacttactttgcatgtcactcaaaaattttgcctcaaaactggtgagctgaatttttgcagttaaagcatcgtgtagtgtttttcttagtccgttatgtaggtaggaatctgatgtaatggttgttggtattttgtcaccattcatttttatctggttgttctcaagttcggttacgagatccatttgtctatctagttcaacttggaaaatcaacgtatcagtcgggcggcctcgcttatcaaccaccaatttcatattgctgtaagtgtttaaatctttacttattggtttcaaaacccattggttaagccttttaaactcatggtagttattttcaagcattaacatgaacttaaattcatcaaggctaatctctatatttgccttgtgagttttcttttgtgttagttcttttaataaccactcataaatcctcatagagtatttgttttcaaaagacttaacatgttccagattatattttatgaatttttttaactggaaaagataaggcaatatctcttcactaaaaactaattctaatttttcgcttgagaacttggcatagtttgtccactggaaaatctcaaagcctttaaccaaaggattcctgatttccacagttctcgtcatcagctctctggttgctttagctaatacaccataagcattttccctactgatgttcatcatctgagcgtattggttataagtgaacgataccgtccgttctttccttgtagggttttcaatcgtggggttgagtagtgccacacagcataaaattagcttggtttcatgctccgttaagtcatagcgactaatcgctagttcatttgctttgaaaacaactaattcagacatacatctcaattggtctaggtgattttaatcactataccaattgagatgggctagtcaatgataattactagtccttttcctttgagttgtgggtatctgtaaattctgctagacctttgctggaaaacttgtaaattctgctagaccctctgtaaattccgctagacctttgtgtgttttttttgtttatattcaagtggttataatttatagaataaagaaagaataaaaaaagataaaaagaatagatcccagccctgtgtataactcactactttagtcagttccgcagtattacaaaaggatgtcgcaaacgctgtttgctcctctacaaaacagaccttaaaaccctaaaggcttaagtagcaccctcgcaagctcgggcaaatcgctgaatattccttttgtctccgaccatcaggcacctgagtcgctgtctttttcgtgacattcagttcgctgcgctcacggctctggcagtgaatgggggtaaatggcactacaggcgccttttatggattcatgcaaggaaactacccataatacaagaaaagcccgtcacgggcttctcagggcgttttatggcgggtctgctatgtggtgctatctgactttttgctgttcagcagttcctgccctctgattttccagtctgaccacttcggattatcccgtgacaggtcattcagactggctaatgcacccagtaaggcagcggtatcatcaacaggcttacccgtcttactgtc

SEQ ID NO: 5214 - DNA, 3946 bp, synthetic construct
  source 1..3946: mol_type = other DNA
gaagatcatcttattaatcagataaaatatttctagatttcagtgcaatttatctcttcaaatgtagcacctgaagtcagccccatacgatataagttgtaattctcatgttagtcatgccccgcgcccaccggaaggagctgactgggttgaaggctctcaagggcatcggtcgagatcccggtgcctaatgagtgagctaacttacattaattgcgttgcgctcactgcccgctttccagtcgggaaacctgtcgtgccagctgcattaatgaatcggccaacgcgcggggagaggcggtttgcgtattgggcgccagggtggtttttcttttcaccagtgagacgggcaacagctgattgcccttcaccgcctggccctgagagagttgcagcaagcggtccacgctggtttgccccagcaggcgaaaatcctgtttgatggtggttaacggcgggatataacatgagctgtcttcggtatcgtcgtatcccactaccgagatgtccgcaccaacgcgcagcccggactcggtaatggcgcgcattgcgcccagcgccatctgatcgttggcaaccagcatcgcagtgggaacgatgccctcattcagcatttgcatggtttgttgaaaaccggacatggcactccagtcgccttcccgttccgctatcggctgaatttgattgcgagtgagatatttatgccagccagccagacgcagacgcgccgagacagaacttaatgggcccgctaacagcgcgatttgctggtgacccaatgcgaccagatgctccacgcccagtcgcgtaccgtcttcatgggagaaaataatactgttgatgggtgtctggtcagagacatcaagaaataacgccggaacattagtgcaggcagcttccacagcaatggcatcctggtcatccagcggatagttaatgatcagcccactgacgcgttgcgcgagaagattgtgcaccgccgctttacaggcttcgacgccgcttcgttctaccatcgacaccaccacgctggcacccagttgatcggcgcgagatttaatcgccgcgacaatttgcgacggcgcgtgcagggccagactggaggtggcaacgccaatcagcaacgactgtttgcccgccagttgttgtgccacgcggttgggaatgtaattcagctccgccatcgccgcttccactttttcccgcgttttcgcagaaacgtggctggcctggttcaccacgcgggaaacggtctgataagagacaccggcatactctgcgacatcgtataacgttactggtttcacattcaccaccctgaattgactctcttccgggcgctatcatgccataccgcgaaaggttttgcgccattcgatggtgtccgggatctcgacgctctcccttatgcgactcctgcattaggaaattaatacgactcactataggggaattgtgagcggataacaattcccctgtagaaataattttgtttaactttaataaggagatataccatgttcgaacaacgcgtaaattctgacgtactgaccgtttctaccgttaactctcaggatcaggtaacccaaaaacccctgcgtgactcggttaaacaggcactgaagaactattttgctcaactgaatggtcaggatgtgaatgacctctatgagctggtactggctgaagtagaacagcccctgttggacatggtgatgcaatacacccgtggtaaccagacccgtgctgcgctgatgatgggcatcaaccgtggtacgctgcgtaaaaaattgaaaaaatacggcatgaactaattcctaggctgctgccaccgctgagcaataactagcataaccccttggggcctctaaacgggtcttgaggggttttttgctgaaacctcaggcatttgagaagcacacggtcacactgcttccggtagtcaataaaccggtaaaccagcaatagacataagcggctatttaacgaccctgccctgaaccgacgaccgggtcgaatttgctttcgaatttctgccattcatccgcttattatcacttattcaggcgtagcaaccaggcgtttaagggcaccaataactgccttaaaaaaattacgccccgccctgccactcatcgcagtactgttgtaattcattaagcattctgccgacatggaagccatcacaaacggcatgatgaacctgaatcgccagcggcatcagcaccttgtcgccttgcgtataatatttgcccatagtgaaaacgggggcgaagaagttgtccatattggccacgtttaaatcaaaactggtgaaactcacccagggattggctgagacgaaaaacatattctcaataaaccctttagggaaataggccaggttttcaccgtaacacgccacatcttgcgaatatatgtgtagaaactgccggaaatcgtcgtggtattcactccagagcgatgaaaacgtttcagtttgctcatggaaaacggtgtaacaagggtgaacactatcccatatcaccagctcaccgtctttcattgccatacggaactccggatgagcattcatcaggcgggcaagaatgtgaataaaggccggataaaacttgtgcttatttttctttacggtctttaaaaaggccgtaatatccagctgaacggtctggttataggtacattgagcaactgactgaaatgcctcaaaatgttctttacgatgccattgggatatatcaacggtggtatatccagtgatttttttctccattttagcttccttagctcctgaaaatctcgataactcaaaaaatacgcccggtagtgatcttatttcattatggtgaaagttggaacctcttacgtgccgatcaacgtctcattttcgccaaaagttggcccagggcttcccggtatcaacagggacaccaggatttatttattctgcgaagtgatcttccgtcacaggtatttattcggcgcaaagtgcgtcgggtgatgctgccaacttactgatttagtgtatgatggtgtttttgaggtgctccagtggcttctgtttctatcagctgtccctcctgttcagctactgacggggtggtgcgtaacggcaaaagcaccgccggacatcagcgctagcggagtgtatactggcttactatgttggcactgatgagggtgtcagtgaagtgcttcatgtggcaggagaaaaaaggctgcaccggtgcgtcagcagaatatgtgatacaggatatattccgcttcctcgctcactgactcgctacgctcggtcgttcgactgcggcgagcggaaatggcttacgaacggggcggagatttcctggaagatgccaggaagatacttaacagggaagtgagagggccgcggcaaagccgtttttccataggctccgcccccctgacaagcatcacgaaatctgacgctcaaatcagtggtggcgaaacccgacaggactataaagataccaggcgtttcccctggcggctccctcgtgcgctctcctgttcctgcctttcggtttaccggtgtcattccgctgttatggccgcgtttgtctcattccacgcctgacactcagttccgggtaggcagttcgctccaagctggactgtatgcacgaaccccccgttcagtccgaccgctgcgccttatccggtaactatcgtcttgagtccaacccggaaagacatgcaaaagcaccactggcagcagccactggtaattgatttagaggagttagtcttgaagtcatgcgccggttaaggctaaactgaaaggacaagttttggtgactgcgctcctccaagccagttacctcggttcaaagagttggtagctcagagaaccttcgaaaaaccgccctgcaaggcggttttttcgttttcagagcaagagattacgcgcagaccaaaacgatctcaa

SEQ ID NO: 5215 - DNA, 2769 bp, synthetic construct
  source 1..2769: mol_type = other DNA
tccccgtcgtgtagataactacgatacgggagggcttaccatctggccccagtgctgcaatgataccgcgagacccacgctcaccggctccagatttatcagcaataaaccagccagccggaagggccgagcgcagaagtggtcctgcaactttatccgcctccatccagtctattaattgttgccgggaagctagagtaagtagttcgccagttaatagtttgcgcaacgttgttgccattgctacaggcatcgtggtgtcacgctcgtcgtttggtatggcttcattcagctccggttcccaacgatcaaggcgagttacatgatcccccatgttgtgcaaaaaagcggttagctccttcggtcctccgatcgttgtcagaagtaagttggccgcagtgttatcactcatggttatggcagcactgcataattctcttactgtcatgccatccgtaagatgcttttctgtgactggtgagtactcaaccaagtcattctgagaatagtgtatgcggcgaccgagttgctcttgcccggcgtcaatacgggataataccgcgccacatagcagaactttaaaagtgctcatcattggaaaacgttcttcggggcgaaaactctcaaggatcttaccgctgttgagatccagttcgatgtaacccactcgtgcacccaactgatcttcagcatcttttactttcaccagcgtttctgggtgagcaaaaacaggaaggcaaaatgccgcaaaaaagggaataagggcgacacggaaatgttgaatactcatactcttcctttttcaatattattgaagcatttatcagggttattgtctcatgagcggatacatatttgaatgtatttagaaaaataaacaaataggggttccgcgcacatttccccgaaaagtgccacctgacgtcccatggtgaagctcgcattacagtgaatgttgttgatgcaaccataaagtgatatttaataattatttatccgactcaacggcaccacaaaacaaccatatattgatatctcacaaaacaaccataagttgatatttttgtgaatcgagtatttcagcaaaactactgcagtaagaattggtcatcacttactgcgtgtcagagaggcggccgccgaagctaagtggtttcaccaaaactggtgaaactcacccagggattggctgagacgaaaaacatattctcaataaaccctttagggaaataggccaggttttcaccgtaacacgccacatcttgcgaatatatgtgtagaaactgccggaaatcgtcgtggtattcactccagagcgatgaaaacgtttcagtttgctcatggaaaacggtgtaacaagggtgaacactatcccatatcaccagctcaccgtctttcattgccatacggaactccggatgagcattcatcaggcgggcaagaatgtgaataaaggccggataaaacttgtgcttatttttctttacggtctttaaaaaggccgtaatatccagctgaacggtctggttataggtacattgagcaactgactggcatgtttcccttgtagtgggcgcgcccatgtgtagcagagaagaccctgctagcagtgtcggtgcgaatacgggtcgtagcaatgttggtctgactatgatcagaggcaatatcaatttatgggtgtgataattatcaatttatgggtgtaattatcattttatggttgtatcaacaaatgtgagagttagctgcacatacgctcttccgcttcctcgctcactgactcgctgcgctcggtcgttcggctgcggcgagcggtatcagctcactcaaaggcggtaatacggttatccacagaatcaggggataacgcaggaaagaacatgtgagcaaaaggccagcaaaaggccaggaaccgtaaaaaggccgcgttgctggcgtttttccataggctccgcccccctgacgagcatcacaaaaatcgacgctcaagtcagaggtggcgaaacccgacaggactataaagataccaggcgtttccccctggaagctccctcgtgcgctctcctgttccgaccctgccgcttaccggatacctgtccgcctttctcccttcgggaagcgtggcgctttctcatagctcacgctgtaggtatctcagttcggtgtaggtcgttcgctccaagctgggctgtgtgcacgaaccccccgttcagcccgaccgctgcgccttatccggtaactatcgtcttgagtccaacccggtaagacacgacttatcgccactggcagcagccactggtaacaggattagcagagcgaggtatgtaggcggtgctacagagttcttgaagtggtggcctaactacggctacactagaagaacagtatttggtatctgcgctctgctgaagccagttaccttcggaaaaagagttggtagctcttgatccggcaaacaaaccaccgctggtagcggtggtttttttgtttgcaagcagcagattacgcgcagaaaaaaaggatctcaagaagatcctttgatcttttctacggggtctgacgctcagtggaacgaaaactcacgttaagggattttggtcatgagattatcaaaaaggatcttcacctagatccttttaaattaaaaatgaagttttaaatcaatctaaagtatatatgagtaaacttggtctgacagttaccaatgcttaatcagtgaggcacctatctcagcgatctgtctatttcgttcatccatagttgcctgac

SEQ ID NO: 5216 - DNA, 2769 bp, synthetic construct
  source 1..2769: mol_type = other DNA
gccccagtgctgcaatgataccgcgagacccacgctcaccggctccagatttatcagcaataaaccagccagccggaagggccgagcgcagaagtggtcctgcaactttatccgcctccatccagtctattaattgttgccgggaagctagagtaagtagttcgccagttaatagtttgcgcaacgttgttgccattgctacaggcatcgtggtgtcacgctcgtcgtttggtatggcttcattcagctccggttcccaacgatcaaggcgagttacatgatcccccatgttgtgcaaaaaagcggttagctccttcggtcctccgatcgttgtcagaagtaagttggccgcagtgttatcactcatggttatggcagcactgcataattctcttactgtcatgccatccgtaagatgcttttctgtgactggtgagtactcaaccaagtcattctgagaatagtgtatgcggcgaccgagttgctcttgcccggcgtcaatacgggataataccgcgccacatagcagaactttaaaagtgctcatcattggaaaacgttcttcggggcgaaaactctcaaggatcttaccgctgttgagatccagttcgatgtaacccactcgtgcacccaactgatcttcagcatcttttactttcaccagcgtttctgggtgagcaaaaacaggaaggcaaaatgccgcaaaaaagggaataagggcgacacggaaatgttgaatactcatactcttcctttttcaatattattgaagcatttatcagggttattgtctcatgagcggatacatatttgaatgtatttagaaaaataaacaaataggggttccgcgcacatttccccgaaaagtgccacctgacgtcccatggtgaagctcgcattacagtgaatgttgttgatgcaaccataaagtgatatttaataattatttattaagttgctgattaccacaaaacaaccatatattgatatctcacaaaacaaccataagttgatatttttgtgaatcgagtatttcagcaaaactactgcagtaagaattggtcatcacttactgcgtgtcagagaggcggccgccgaagctaagtggtttcaccaaaactggtgaaactcacccagggattggctgagacgaaaaacatattctcaataaaccctttagggaaataggccaggttttcaccgtaacacgccacatcttgcgaatatatgtgtagaaactgccggaaatcgtcgtggtattcactccagagcgatgaaaacgtttcagtttgctcatggaaaacggtgtaacaagggtgaacactatcccatatcaccagctcaccgtctttcattgccatacggaactccggatgagcattcatcaggcgggcaagaatgtgaataaaggccggataaaacttgtgcttatttttctttacggtctttaaaaaggccgtaatatccagctgaacggtctggttataggtacattgagcaactgactggcatgtttcccttgtagtgggcgcgcccatgtgtagcagagaagaccctgctagcagtgtcggtgcgaatacgggtcgtagcaatgttggtctgactatgatcagaggcaatatcaatttatgggtgtgataattatcaatttatgggtgtaattatcattttatggttgtatcaacaaatgtgagagttagctgcacatacgctcttccgcttcctcgctcactgactcgctgcgctcggtcgttcggctgcggcgagcggtatcagctcactcaaaggcggtaatacggttatccacagaatcaggggataacgcaggaaagaacatgtgagcaaaaggccagcaaaaggccaggaaccgtaaaaaggccgcgttgctggcgtttttccataggctccgcccccctgacgagcatcacaaaaatcgacgctcaagtcagaggtggcgaaacccgacaggactataaagataccaggcgtttccccctggaagctccctcgtgcgctctcctgttccgaccctgccgcttaccggatacctgtccgcctttctcccttcgggaagcgtggcgctttctcatagctcacgctgtaggtatctcagttcggtgtaggtcgttcgctccaagctgggctgtgtgcacgaaccccccgttcagcccgaccgctgcgccttatccggtaactatcgtcttgagtccaacccggtaagacacgacttatcgccactggcagcagccactggtaacaggattagcagagcgaggtatgtaggcggtgctacagagttcttgaagtggtggcctaactacggctacactagaagaacagtatttggtatctgcgctctgctgaagccagttaccttcggaaaaagagttggtagctcttgatccggcaaacaaaccaccgctggtagcggtggtttttttgtttgcaagcagcagattacgcgcagaaaaaaaggatctcaagaagatcctttgatcttttctacggggtctgacgctcagtggaacgaaaactcacgttaagggattttggtcatgagattatcaaaaaggatcttcacctagatccttttaaattaaaaatgaagttttaaatcaatctaaagtatatatgagtaaacttggtctgacagttaccaatgcttaatcagtgaggcacctatctcagcgatctgtctatttcgttcatccatagttgcctgactccccgtcgtgtagataactacgatacgggagggcttaccatctg

SEQ ID NO: 5217 - DNA, 4232 bp, synthetic construct
  source 1..4232: mol_type = other DNA
caggcgtttcccctggcggctccctcgtgcgctctcctgttcctgcctttcggtttaccggtgtcattccgctgttatggccgcgtttgtctcattccacgcctgacactcagttccgggtaggcagttcgctccaagctggactgtatgcacgaaccccccgttcagtccgaccgctgcgccttatccggtaactatcgtcttgagtccaacccggaaagacatgcaaaagcaccactggcagcagccactggtaattgatttagaggagttagtcttgaagtcatgcgccggttaaggctaaactgaaaggacaagttttggtgactgcgctcctccaagccagttacctcggttcaaagagttggtagctcagagaaccttcgaaaaaccgccctgcaaggcggttttttcgttttcagagcaagagattacgcgcagaccaaaacgatctcaagaagatcatcttattaatcagataaaatatttctagatttcagtgcaatttatctcttcaaatgtagcacctgaagtcagccccatacgatataagttgtaattctcatgttagtcatgccccgcgcccaccggaaggagctgactgggttgaaggctctcaagggcatcggtcgagatcccggtgcctaatgagtgagctaacttacattaattgcgttgcgctcactgcccgctttccagtcgggaaacctgtcgtgccagctgcattaatgaatcggccaacgcgcggggagaggcggtttgcgtattgggcgccagggtggtttttcttttcaccagtgagacgggcaacagctgattgcccttcaccgcctggccctgagagagttgcagcaagcggtccacgctggtttgccccagcaggcgaaaatcctgtttgatggtggttaacggcgggatataacatgagctgtcttcggtatcgtcgtatcccactaccgagatgtccgcaccaacgcgcagcccggactcggtaatggcgcgcattgcgcccagcgccatctgatcgttggcaaccagcatcgcagtgggaacgatgccctcattcagcatttgcatggtttgttgaaaaccggacatggcactccagtcgccttcccgttccgctatcggctgaatttgattgcgagtgagatatttatgccagccagccagacgcagacgcgccgagacagaacttaatgggcccgctaacagcgcgatttgctggtgacccaatgcgaccagatgctccacgcccagtcgcgtaccgtcttcatgggagaaaataatactgttgatgggtgtctggtcagagacatcaagaaataacgccggaacattagtgcaggcagcttccacagcaatggcatcctggtcatccagcggatagttaatgatcagcccactgacgcgttgcgcgagaagattgtgcaccgccgctttacaggcttcgacgccgcttcgttctaccatcgacaccaccacgctggcacccagttgatcggcgcgagatttaatcgccgcgacaatttgcgacggcgcgtgcagggccagactggaggtggcaacgccaatcagcaacgactgtttgcccgccagttgttgtgccacgcggttgggaatgtaattcagctccgccatcgccgcttccactttttcccgcgttttcgcagaaacgtggctggcctggttcaccacgcgggaaacggtctgataagagacaccggcatactctgcgacatcgtataacgttactggtttcacattcaccaccctgaattgactctcttccgggcgctatcatgccataccgcgaaaggttttgcgccattcgatggtgtccgggatctcgacgctctcccttatgcgactcctgcattaggaaattaatacgactcactataggggaattgtgagcggataacaattcccctgtagaaataattttgtttaactttaataaggagatataccatgggaacaaaatcagaactaatagagaggttggctacccagcaaagccacatcccggcaaagacggtggaagatgccgtcaaggagatgctggagcacatggcgtccaccctggcgcaaggtgggtctggcggtttgaccaaagcggaaatgagcgaatatctgttcgacaagctcggcctgtcgaaacgtgacgcgaaagagttagttgagttgttcttcgaggaaatccgcagagcgctggagaacggcgaacaggttaaactgtccggtttcggcaattttgatctgcgcgacaagaaccagcgtccgggtcgcaacccgaaaaccggtgaggacatcccgattaccgcacgtcgtgtggttacctttcgcccaggtcagaaactgaaaagccgtgtggaaaatgcgggtggcggcgaacgtattgagatccgtggtttcggctcttttagcctgcattatcgtgctccgcgtaccggccgtaacccgaaaaccggtgataaggtggagttggaaggtaagtacgttccgcattttaaaccgggtaaagaactgcgtgatcgtgccaatatttacggctaacctaggctgctgccaccgctgagcaataactagcataaccccttggggcctctaaacgggtcttgaggggttttttgctgaaacctcaggcatttgagaagcacacggtcacactgcttccggtagtcaataaaccggtaaaccagcaatagacataagcggctatttaacgaccctgccctgaaccgacgaccgggtcgaatttgctttcgaatttctgccattcatccgcttattatcacttattcaggcgtagcaaccaggcgtttaagggcaccaataactgccttaaaaaaattacgccccgccctgccactcatcgcagtactgttgtaattcattaagcattctgccgacatggaagccatcacaaacggcatgatgaacctgaatcgccagcggcatcagcaccttgtcgccttgcgtataatatttgcccatagtgaaaacgggggcgaagaagttgtccatattggccacgtttaaatcaaaactggtgaaactcacccagggattggctgagacgaaaaacatattctcaataaaccctttagggaaataggccaggttttcaccgtaacacgccacatcttgcgaatatatgtgtagaaactgccggaaatcgtcgtggtattcactccagagcgatgaaaacgtttcagtttgctcatggaaaacggtgtaacaagggtgaacactatcccatatcaccagctcaccgtctttcattgccatacggaactccggatgagcattcatcaggcgggcaagaatgtgaataaaggccggataaaacttgtgcttatttttctttacggtctttaaaaaggccgtaatatccagctgaacggtctggttataggtacattgagcaactgactgaaatgcctcaaaatgttctttacgatgccattgggatatatcaacggtggtatatccagtgatttttttctccattttagcttccttagctcctgaaaatctcgataactcaaaaaatacgcccggtagtgatcttatttcattatggtgaaagttggaacctcttacgtgccgatcaacgtctcattttcgccaaaagttggcccagggcttcccggtatcaacagggacaccaggatttatttattctgcgaagtgatcttccgtcacaggtatttattcggcgcaaagtgcgtcgggtgatgctgccaacttactgatttagtgtatgatggtgtttttgaggtgctccagtggcttctgtttctatcagctgtccctcctgttcagctactgacggggtggtgcgtaacggcaaaagcaccgccggacatcagcgctagcggagtgtatactggcttactatgttggcactgatgagggtgtcagtgaagtgcttcatgtggcaggagaaaaaaggctgcaccggtgcgtcagcagaatatgtgatacaggatatattccgcttcctcgctcactgactcgctacgctcggtcgttcgactgcggcgagcggaaatggcttacgaacggggcggagatttcctggaagatgccaggaagatacttaacagggaagtgagagggccgcggcaaagccgtttttccataggctccgcccccctgacaagcatcacgaaatctgacgctcaaatcagtggtggcgaaacccgacaggactataaagatac

SEQ ID NO: 5218 - DNA, 5729 bp, synthetic construct
  source 1..5729: mol_type = other DNA
gacggatcgggagatctcccgatcccctatggtgcactctcagtacaatctgctctgatgccgcatagttaagccagtatctgctccctgcttgtgtgttggaggtcgctgagtagtgcgcgagcaaaatttaagctacaacaaggcaaggcttgaccgacaattgcatgaagaatctgcttagggttaggcgttttgcgctgcttcgcgatgtacgggccagatatacgcgttgacattgattattgactagttattaatagtaatcaattacggggtcattagttcatagcccatatatggagttccgcgttacataacttacggtaaatggcccgcctggctgaccgcccaacgacccccgcccattgacgtcaataatgacgtatgttcccatagtaacgccaatagggactttccattgacgtcaatgggtggagtatttacggtaaactgcccacttggcagtacatcaagtgtatcatatgccaagtacgccccctattgacgtcaatgacggtaaatggcccgcctggcattatgcccagtacatgaccttatgggactttcctacttggcagtacatctacgtattagtcatcgctattaccatggtgatgcggttttggcagtacatcaatgggcgtggatagcggtttgactcacggggatttccaagtctccaccccattgacgtcaatgggagtttgttttggcaccaaaatcaacgggactttccaaaatgtcgtaacaactccgccccattgacgcaaatgggcggtaggcgtgtacggtgggaggtctatataagcagagctctctggctaactagagaacccactgcttactggcttatcgaaattaatacgactcactatagggagacccaagctggctagcgtttaaacttaagcttggtaccgccaccatggccctgacaaaggccgagatgagcgagtacctgtttgacaagctgggcctgtctaagcgggacgccaaagagctggtcgagctgttcttcgaggaaattcggcgggccctggaaaacggcgagcaagtgaaactcagcggcttcggcaacttcgacctgcgggacaagaaccagcgcccaggaagaaaccccaagacaggcgaggacatccctatcaccgctagaagggttgtgaccttcagacctggacagaaactgaagtctcgggtggagaacgccagccccaaggacgagggctccggaaaacggacagccgacggaagcgagttcgagtcaccgaaaaagaagcgaaaagtttgatctagagggcccgtttaaacccgctgatcagcctcgactgtgccttctagttgccagccatctgttgtttgcccctcccccgtgccttccttgaccctggaaggtgccactcccactgtcctttcctaataaaatgaggaaattgcatcgcattgtctgagtaggtgtcattctattctggggggtggggtggggcaggacagcaagggggaggattgggaagacaatagcaggcatgctggggatgcggtgggctctatggcttctgaggcggaaagaaccagctggggctctagggggtatccccacgcgccctgtagcggcgcattaagcgcggcgggtgtggtggttacgcgcagcgtgaccgctacacttgccagcgccctagcgcccgctcctttcgctttcttcccttcctttctcgccacgttcgccggctttccccgtcaagctctaaatcgggggctccctttagggttccgatttagtgctttacggcacctcgaccccaaaaaacttgattagggtgatggttcacgtagtgggccatcgccctgatagacggtttttcgccctttgacgttggagtccacgttctttaatagtggactcttgttccaaactggaacaacactcaaccctatctcggtctattcttttgatttataagggattttgccgatttcggcctattggttaaaaaatgagctgatttaacaaaaatttaacgcgaattaattctgtggaatgtgtgtcagttagggtgtggaaagtccccaggctccccagcaggcagaagtatgcaaagcatgcatctcaattagtcagcaaccaggtgtggaaagtccccaggctccccagcaggcagaagtatgcaaagcatgcatctcaattagtcagcaaccatagtcccgcccctaactccgcccatcccgcccctaactccgcccagttccgcccattctccgccccatggctgactaattttttttatttatgcagaggccgaggccgcctctgcctctgagctattccagaagtagtgaggaggcttttttggaggcctaggcttttgcaaaaagctcccgggagcttgtatatccattttcggatctgatcaagagacaggatgaggatcgtttcgcatgattgaacaagatggattgcacgcaggttctccggccgcttgggtggagaggctattcggctatgactgggcacaacagacaatcggctgctctgatgccgccgtgttccggctgtcagcgcaggggcgcccggttctttttgtcaagaccgacctgtccggtgccctgaatgaactgcaggacgaggcagcgcggctatcgtggctggccacgacgggcgttccttgcgcagctgtgctcgacgttgtcactgaagcgggaagggactggctgctattgggcgaagtgccggggcaggatctcctgtcatctcaccttgctcctgccgagaaagtatccatcatggctgatgcaatgcggcggctgcatacgcttgatccggctacctgcccattcgaccaccaagcgaaacatcgcatcgagcgagcacgtactcggatggaagccggtcttgtcgatcaggatgatctggacgaagagcatcaggggctcgcgccagccgaactgttcgccaggctcaaggcgcgcatgcccgacggcgaggatctcgtcgtgacccatggcgatgcctgcttgccgaatatcatggtggaaaatggccgcttttctggattcatcgactgtggccggctgggtgtggcggaccgctatcaggacatagcgttggctacccgtgatattgctgaagagcttggcggcgaatgggctgaccgcttcctcgtgctttacggtatcgccgctcccgattcgcagcgcatcgccttctatcgccttcttgacgagttcttctgagcgggactctggggttcgaaatgaccgaccaagcgacgcccaacctgccatcacgagatttcgattccaccgccgccttctatgaaaggttgggcttcggaatcgttttccgggacgccggctggatgatcctccagcgcggggatctcatgctggagttcttcgcccaccccaacttgtttattgcagcttataatggttacaaataaagcaatagcatcacaaatttcacaaataaagcatttttttcactgcattctagttgtggtttgtccaaactcatcaatgtatcttatcatgtctgtataccgtcgacctctagctagagcttggcgtaatcatggtcatagctgtttcctgtgtgaaattgttatccgctcacaattccacacaacatacgagccggaagcataaagtgtaaagcctggggtgcctaatgagtgagctaactcacattaattgcgttgcgctcactgcccgctttccagtcgggaaacctgtcgtgccagctgcattaatgaatcggccaacgcgcggggagaggcggtttgcgtattgggcgctcttccgcttcctcgctcactgactcgctgcgctcggtcgttcggctgcggcgagcggtatcagctcactcaaaggcggtaatacggttatccacagaatcaggggataacgcaggaaagaacatgtgagcaaaaggccagcaaaaggccaggaaccgtaaaaaggccgcgttgctggcgtttttccataggctccgcccccctgacgagcatcacaaaaatcgacgctcaagtcagaggtggcgaaacccgacaggactataaagataccaggcgtttccccctggaagctccctcgtgcgctctcctgttccgaccctgccgcttaccggatacctgtccgcctttctcccttcgggaagcgtggcgctttctcatagctcacgctgtaggtatctcagttcggtgtaggtcgttcgctccaagctgggctgtgtgcacgaaccccccgttcagcccgaccgctgcgccttatccggtaactatcgtcttgagtccaacccggtaagacacgacttatcgccactggcagcagccactggtaacaggattagcagagcgaggtatgtaggcggtgctacagagttcttgaagtggtggcctaactacggctacactagaagaacagtatttggtatctgcgctctgctgaagccagttaccttcggaaaaagagttggtagctcttgatccggcaaacaaaccaccgctggtagcggtttttttgtttgcaagcagcagattacgcgcagaaaaaaaggatctcaagaagatcctttgatcttttctacggggtctgacgctcagtggaacgaaaactcacgttaagggattttggtcatgagattatcaaaaaggatcttcacctagatccttttaaattaaaaatgaagttttaaatcaatctaaagtatatatgagtaaacttggtctgacagttaccaatgcttaatcagtgaggcacctatctcagcgatctgtctatttcgttcatccatagttgcctgactccccgtcgtgtagataactacgatacgggagggcttaccatctggccccagtgctgcaatgataccgcgagacccacgctcaccggctccagatttatcagcaataaaccagccagccggaagggccgagcgcagaagtggtcctgcaactttatccgcctccatccagtctattaattgttgccgggaagctagagtaagtagttcgccagttaatagtttgcgcaacgttgttgccattgctacaggcatcgtggtgtcacgctcgtcgtttggtatggcttcattcagctccggttcccaacgatcaaggcgagttacatgatcccccatgttgtgcaaaaaagcggttagctccttcggtcctccgatcgttgtcagaagtaagttggccgcagtgttatcactcatggttatggcagcactgcataattctcttactgtcatgccatccgtaagatgcttttctgtgactggtgagtactcaaccaagtcattctgagaatagtgtatgcggcgaccgagttgctcttgcccggcgtcaatacgggataataccgcgccacatagcagaactttaaaagtgctcatcattggaaaacgttcttcggggcgaaaactctcaaggatcttaccgctgttgagatccagttcgatgtaacccactcgtgcacccaactgatcttcagcatcttttactttcaccagcgtttctgggtgagcaaaaacaggaaggcaaaatgccgcaaaaaagggaataagggcgacacggaaatgttgaatactcatactcttcctttttcaatattattgaagcatttatcagggttattgtctcatgagcggatacatatttgaatgtatttagaaaaataaacaaataggggttccgcgcacatttccccgaaaagtgccacctgacgtc

SEQ ID NO: 5219 - DNA, 5747 bp, synthetic construct
  source 1..5747: mol_type = other DNA
gacggatcgggagatctcccgatcccctatggtgcactctcagtacaatctgctctgatgccgcatagttaagccagtatctgctccctgcttgtgtgttggaggtcgctgagtagtgcgcgagcaaaatttaagctacaacaaggcaaggcttgaccgacaattgcatgaagaatctgcttagggttaggcgttttgcgctgcttcgcgatgtacgggccagatatacgcgttgacattgattattgactagttattaatagtaatcaattacggggtcattagttcatagcccatatatggagttccgcgttacataacttacggtaaatggcccgcctggctgaccgcccaacgacccccgcccattgacgtcaataatgacgtatgttcccatagtaacgccaatagggactttccattgacgtcaatgggtggagtatttacggtaaactgcccacttggcagtacatcaagtgtatcatatgccaagtacgccccctattgacgtcaatgacggtaaatggcccgcctggcattatgcccagtacatgaccttatgggactttcctacttggcagtacatctacgtattagtcatcgctattaccatggtgatgcggttttggcagtacatcaatgggcgtggatagcggtttgactcacggggatttccaagtctccaccccattgacgtcaatgggagtttgttttggcaccaaaatcaacgggactttccaaaatgtcgtaacaactccgccccattgacgcaaatgggcggtaggcgtgtacggtgggaggtctatataagcagagctctctggctaactagagaacccactgcttactggcttatcgaaattaatacgactcactatagggagacccaagctggctagcgtttaaacttaagcttggtaccgagctcggatccgccaccatgggcaaacggacagccgacggaagcgagttcgagtcaccgaaaaagaagcgaaaagttggctccggaatggccctgacaaaggccgagatgagcgagtacctgtttgacaagctgggcctgtctaagcgggacgccaaagagctggtcgagctgttcttcgaggaaattcggcgggccctggaaaacggcgagcaagtgaaactcagcggcttcggcaacttcgacctgcgggacaagaaccagcgcccaggaagaaaccccaagacaggcgaggacatccctatcaccgctagaagggttgtgaccttcagacctggacagaaactgaagtctcgggtggagaacgccagccccaaggacgagtgatctagagggcccgtttaaacccgctgatcagcctcgactgtgccttctagttgccagccatctgttgtttgcccctcccccgtgccttccttgaccctggaaggtgccactcccactgtcctttcctaataaaatgaggaaattgcatcgcattgtctgagtaggtgtcattctattctggggggtggggtggggcaggacagcaagggggaggattgggaagacaatagcaggcatgctggggatgcggtgggctctatggcttctgaggcggaaagaaccagctggggctctagggggtatccccacgcgccctgtagcggcgcattaagcgcggcgggtgtggtggttacgcgcagcgtgaccgctacacttgccagcgccctagcgcccgctcctttcgctttcttcccttcctttctcgccacgttcgccggctttccccgtcaagctctaaatcgggggctccctttagggttccgatttagtgctttacggcacctcgaccccaaaaaacttgattagggtgatggttcacgtagtgggccatcgccctgatagacggtttttcgccctttgacgttggagtccacgttctttaatagtggactcttgttccaaactggaacaacactcaaccctatctcggtctattcttttgatttataagggattttgccgatttcggcctattggttaaaaaatgagctgatttaacaaaaatttaacgcgaattaattctgtggaatgtgtgtcagttagggtgtggaaagtccccaggctccccagcaggcagaagtatgcaaagcatgcatctcaattagtcagcaaccaggtgtggaaagtccccaggctccccagcaggcagaagtatgcaaagcatgcatctcaattagtcagcaaccatagtcccgcccctaactccgcccatcccgcccctaactccgcccagttccgcccattctccgccccatggctgactaattttttttatttatgcagaggccgaggccgcctctgcctctgagctattccagaagtagtgaggaggcttttttggaggcctaggcttttgcaaaaagctcccgggagcttgtatatccattttcggatctgatcaagagacaggatgaggatcgtttcgcatgattgaacaagatggattgcacgcaggttctccggccgcttgggtggagaggctattcggctatgactgggcacaacagacaatcggctgctctgatgccgccgtgttccggctgtcagcgcaggggcgcccggttctttttgtcaagaccgacctgtccggtgccctgaatgaactgcaggacgaggcagcgcggctatcgtggctggccacgacgggcgttccttgcgcagctgtgctcgacgttgtcactgaagcgggaagggactggctgctattgggcgaagtgccggggcaggatctcctgtcatctcaccttgctcctgccgagaaagtatccatcatggctgatgcaatgcggcggctgcatacgcttgatccggctacctgcccattcgaccaccaagcgaaacatcgcatcgagcgagcacgtactcggatggaagccggtcttgtcgatcaggatgatctggacgaagagcatcaggggctcgcgccagccgaactgttcgccaggctcaaggcgcgcatgcccgacggcgaggatctcgtcgtgacccatggcgatgcctgcttgccgaatatcatggtggaaaatggccgcttttctggattcatcgactgtggccggctgggtgtggcggaccgctatcaggacatagcgttggctacccgtgatattgctgaagagcttggcggcgaatgggctgaccgcttcctcgtgctttacggtatcgccgctcccgattcgcagcgcatcgccttctatcgccttcttgacgagttcttctgagcgggactctggggttcgaaatgaccgaccaagcgacgcccaacctgccatcacgagatttcgattccaccgccgccttctatgaaaggttgggcttcggaatcgttttccgggacgccggctggatgatcctccagcgcggggatctcatgctggagttcttcgcccaccccaacttgtttattgcagcttataatggttacaaataaagcaatagcatcacaaatttcacaaataaagcatttttttcactgcattctagttgtggtttgtccaaactcatcaatgtatcttatcatgtctgtataccgtcgacctctagctagagcttggcgtaatcatggtcatagctgtttcctgtgtgaaattgttatccgctcacaattccacacaacatacgagccggaagcataaagtgtaaagcctggggtgcctaatgagtgagctaactcacattaattgcgttgcgctcactgcccgctttccagtcgggaaacctgtcgtgccagctgcattaatgaatcggccaacgcgcggggagaggcggtttgcgtattgggcgctcttccgcttcctcgctcactgactcgctgcgctcggtcgttcggctgcggcgagcggtatcagctcactcaaaggcggtaatacggttatccacagaatcaggggataacgcaggaaagaacatgtgagcaaaaggccagcaaaaggccaggaaccgtaaaaaggccgcgttgctggcgtttttccataggctccgcccccctgacgagcatcacaaaaatcgacgctcaagtcagaggtggcgaaacccgacaggactataaagataccaggcgtttccccctggaagctccctcgtgcgctctcctgttccgaccctgccgcttaccggatacctgtccgcctttctcccttcgggaagcgtggcgctttctcatagctcacgctgtaggtatctcagttcggtgtaggtcgttcgctccaagctgggctgtgtgcacgaaccccccgttcagcccgaccgctgcgccttatccggtaactatcgtcttgagtccaacccggtaagacacgacttatcgccactggcagcagccactggtaacaggattagcagagcgaggtatgtaggcggtgctacagagttcttgaagtggtggcctaactacggctacactagaagaacagtatttggtatctgcgctctgctgaagccagttaccttcggaaaaagagttggtagctcttgatccggcaaacaaaccaccgctggtagcggtttttttgtttgcaagcagcagattacgcgcagaaaaaaaggatctcaagaagatcctttgatcttttctacggggtctgacgctcagtggaacgaaaactcacgttaagggattttggtcatgagattatcaaaaaggatcttcacctagatccttttaaattaaaaatgaagttttaaatcaatctaaagtatatatgagtaaacttggtctgacagttaccaatgcttaatcagtgaggcacctatctcagcgatctgtctatttcgttcatccatagttgcctgactccccgtcgtgtagataactacgatacgggagggcttaccatctggccccagtgctgcaatgataccgcgagacccacgctcaccggctccagatttatcagcaataaaccagccagccggaagggccgagcgcagaagtggtcctgcaactttatccgcctccatccagtctattaattgttgccgggaagctagagtaagtagttcgccagttaatagtttgcgcaacgttgttgccattgctacaggcatcgtggtgtcacgctcgtcgtttggtatggcttcattcagctccggttcccaacgatcaaggcgagttacatgatcccccatgttgtgcaaaaaagcggttagctccttcggtcctccgatcgttgtcagaagtaagttggccgcagtgttatcactcatggttatggcagcactgcataattctcttactgtcatgccatccgtaagatgcttttctgtgactggtgagtactcaaccaagtcattctgagaatagtgtatgcggcgaccgagttgctcttgcccggcgtcaatacgggataataccgcgccacatagcagaactttaaaagtgctcatcattggaaaacgttcttcggggcgaaaactctcaaggatcttaccgctgttgagatccagttcgatgtaacccactcgtgcacccaactgatcttcagcatcttttactttcaccagcgtttctgggtgagcaaaaacaggaaggcaaaatgccgcaaaaaagggaataagggcgacacggaaatgttgaatactcatactcttcctttttcaatattattgaagcatttatcagggttattgtctcatgagcggatacatatttgaatgtatttagaaaaataaacaaataggggttccgcgcacatttccccgaaaagtgccacctgacgtc

SEQ ID NO: 5220 - DNA, 5717 bp, synthetic construct
  source 1..5717: mol_type = other DNA
gacggatcgggagatctcccgatcccctatggtgcactctcagtacaatctgctctgatgccgcatagttaagccagtatctgctccctgcttgtgtgttggaggtcgctgagtagtgcgcgagcaaaatttaagctacaacaaggcaaggcttgaccgacaattgcatgaagaatctgcttagggttaggcgttttgcgctgcttcgcgatgtacgggccagatatacgcgttgacattgattattgactagttattaatagtaatcaattacggggtcattagttcatagcccatatatggagttccgcgttacataacttacggtaaatggcccgcctggctgaccgcccaacgacccccgcccattgacgtcaataatgacgtatgttcccatagtaacgccaatagggactttccattgacgtcaatgggtggagtatttacggtaaactgcccacttggcagtacatcaagtgtatcatatgccaagtacgccccctattgacgtcaatgacggtaaatggcccgcctggcattatgcccagtacatgaccttatgggactttcctacttggcagtacatctacgtattagtcatcgctattaccatggtgatgcggttttggcagtacatcaatgggcgtggatagcggtttgactcacggggatttccaagtctccaccccattgacgtcaatgggagtttgttttggcaccaaaatcaacgggactttccaaaatgtcgtaacaactccgccccattgacgcaaatgggcggtaggcgtgtacggtgggaggtctatataagcagagctctctggctaactagagaacccactgcttactggcttatcgaaattaatacgactcactatagggagacccaagctggctagcgtttaaacttaagcttggtaccgccaccatgggcaccaagtccgagctgatcgagagactggctacacagcagagccacatccccgccaagaccgtggaagatgccgtgaaggagatgctggaacacatggccagcaccctggcccagggcgaaagaatcgagatcagaggctttggcagcttcagcctgcactatagagcccctagaaccggcagaaatcctaagaccggagataaggtggaactggaaggcaagtacgtgcctcatttcaagcccggcaaagaactgagagatagagctaatatctacggcggctccggaaaacggacagccgacggaagcgagttcgagtcaccgaaaaagaagcgaaaagtttgatctagagggcccgtttaaacccgctgatcagcctcgactgtgccttctagttgccagccatctgttgtttgcccctcccccgtgccttccttgaccctggaaggtgccactcccactgtcctttcctaataaaatgaggaaattgcatcgcattgtctgagtaggtgtcattctattctggggggtggggtggggcaggacagcaagggggaggattgggaagacaatagcaggcatgctggggatgcggtgggctctatggcttctgaggcggaaagaaccagctggggctctagggggtatccccacgcgccctgtagcggcgcattaagcgcggcgggtgtggtggttacgcgcagcgtgaccgctacacttgccagcgccctagcgcccgctcctttcgctttcttcccttcctttctcgccacgttcgccggctttccccgtcaagctctaaatcgggggctccctttagggttccgatttagtgctttacggcacctcgaccccaaaaaacttgattagggtgatggttcacgtagtgggccatcgccctgatagacggtttttcgccctttgacgttggagtccacgttctttaatagtggactcttgttccaaactggaacaacactcaaccctatctcggtctattcttttgatttataagggattttgccgatttcggcctattggttaaaaaatgagctgatttaacaaaaatttaacgcgaattaattctgtggaatgtgtgtcagttagggtgtggaaagtccccaggctccccagcaggcagaagtatgcaaagcatgcatctcaattagtcagcaaccaggtgtggaaagtccccaggctccccagcaggcagaagtatgcaaagcatgcatctcaattagtcagcaaccatagtcccgcccctaactccgcccatcccgcccctaactccgcccagttccgcccattctccgccccatggctgactaattttttttatttatgcagaggccgaggccgcctctgcctctgagctattccagaagtagtgaggaggcttttttggaggcctaggcttttgcaaaaagctcccgggagcttgtatatccattttcggatctgatcaagagacaggatgaggatcgtttcgcatgattgaacaagatggattgcacgcaggttctccggccgcttgggtggagaggctattcggctatgactgggcacaacagacaatcggctgctctgatgccgccgtgttccggctgtcagcgcaggggcgcccggttctttttgtcaagaccgacctgtccggtgccctgaatgaactgcaggacgaggcagcgcggctatcgtggctggccacgacgggcgttccttgcgcagctgtgctcgacgttgtcactgaagcgggaagggactggctgctattgggcgaagtgccggggcaggatctcctgtcatctcaccttgctcctgccgagaaagtatccatcatggctgatgcaatgcggcggctgcatacgcttgatccggctacctgcccattcgaccaccaagcgaaacatcgcatcgagcgagcacgtactcggatggaagccggtcttgtcgatcaggatgatctggacgaagagcatcaggggctcgcgccagccgaactgttcgccaggctcaaggcgcgcatgcccgacggcgaggatctcgtcgtgacccatggcgatgcctgcttgccgaatatcatggtggaaaatggccgcttttctggattcatcgactgtggccggctgggtgtggcggaccgctatcaggacatagcgttggctacccgtgatattgctgaagagcttggcggcgaatgggctgaccgcttcctcgtgctttacggtatcgccgctcccgattcgcagcgcatcgccttctatcgccttcttgacgagttcttctgagcgggactctggggttcgaaatgaccgaccaagcgacgcccaacctgccatcacgagatttcgattccaccgccgccttctatgaaaggttgggcttcggaatcgttttccgggacgccggctggatgatcctccagcgcggggatctcatgctggagttcttcgcccaccccaacttgtttattgcagcttataatggttacaaataaagcaatagcatcacaaatttcacaaataaagcatttttttcactgcattctagttgtggtttgtccaaactcatcaatgtatcttatcatgtctgtataccgtcgacctctagctagagcttggcgtaatcatggtcatagctgtttcctgtgtgaaattgttatccgctcacaattccacacaacatacgagccggaagcataaagtgtaaagcctggggtgcctaatgagtgagctaactcacattaattgcgttgcgctcactgcccgctttccagtcgggaaacctgtcgtgccagctgcattaatgaatcggccaacgcgcggggagaggcggtttgcgtattgggcgctcttccgcttcctcgctcactgactcgctgcgctcggtcgttcggctgcggcgagcggtatcagctcactcaaaggcggtaatacggttatccacagaatcaggggataacgcaggaaagaacatgtgagcaaaaggccagcaaaaggccaggaaccgtaaaaaggccgcgttgctggcgtttttccataggctccgcccccctgacgagcatcacaaaaatcgacgctcaagtcagaggtggcgaaacccgacaggactataaagataccaggcgtttccccctggaagctccctcgtgcgctctcctgttccgaccctgccgcttaccggatacctgtccgcctttctcccttcgggaagcgtggcgctttctcatagctcacgctgtaggtatctcagttcggtgtaggtcgttcgctccaagctgggctgtgtgcacgaaccccccgttcagcccgaccgctgcgccttatccggtaactatcgtcttgagtccaacccggtaagacacgacttatcgccactggcagcagccactggtaacaggattagcagagcgaggtatgtaggcggtgctacagagttcttgaagtggtggcctaactacggctacactagaagaacagtatttggtatctgcgctctgctgaagccagttaccttcggaaaaagagttggtagctcttgatccggcaaacaaaccaccgctggtagcggtttttttgtttgcaagcagcagattacgcgcagaaaaaaaggatctcaagaagatcctttgatcttttctacggggtctgacgctcagtggaacgaaaactcacgttaagggattttggtcatgagattatcaaaaaggatcttcacctagatccttttaaattaaaaatgaagttttaaatcaatctaaagtatatatgagtaaacttggtctgacagttaccaatgcttaatcagtgaggcacctatctcagcgatctgtctatttcgttcatccatagttgcctgactccccgtcgtgtagataactacgatacgggagggcttaccatctggccccagtgctgcaatgataccgcgagacccacgctcaccggctccagatttatcagcaataaaccagccagccggaagggccgagcgcagaagtggtcctgcaactttatccgcctccatccagtctattaattgttgccgggaagctagagtaagtagttcgccagttaatagtttgcgcaacgttgttgccattgctacaggcatcgtggtgtcacgctcgtcgtttggtatggcttcattcagctccggttcccaacgatcaaggcgagttacatgatcccccatgttgtgcaaaaaagcggttagctccttcggtcctccgatcgttgtcagaagtaagttggccgcagtgttatcactcatggttatggcagcactgcataattctcttactgtcatgccatccgtaagatgcttttctgtgactggtgagtactcaaccaagtcattctgagaatagtgtatgcggcgaccgagttgctcttgcccggcgtcaatacgggataataccgcgccacatagcagaactttaaaagtgctcatcattggaaaacgttcttcggggcgaaaactctcaaggatcttaccgctgttgagatccagttcgatgtaacccactcgtgcacccaactgatcttcagcatcttttactttcaccagcgtttctgggtgagcaaaaacaggaaggcaaaatgccgcaaaaaagggaataagggcgacacggaaatgttgaatactcatactcttcctttttcaatattattgaagcatttatcagggttattgtctcatgagcggatacatatttgaatgtatttagaaaaataaacaaataggggttccgcgcacatttccccgaaaagtgccacctgacgtc

SEQ ID NO: 5221 - DNA, 5735 bp, synthetic construct
  source 1..5735: mol_type = other DNA
gacggatcgggagatctcccgatcccctatggtgcactctcagtacaatctgctctgatgccgcatagttaagccagtatctgctccctgcttgtgtgttggaggtcgctgagtagtgcgcgagcaaaatttaagctacaacaaggcaaggcttgaccgacaattgcatgaagaatctgcttagggttaggcgttttgcgctgcttcgcgatgtacgggccagatatacgcgttgacattgattattgactagttattaatagtaatcaattacggggtcattagttcatagcccatatatggagttccgcgttacataacttacggtaaatggcccgcctggctgaccgcccaacgacccccgcccattgacgtcaataatgacgtatgttcccatagtaacgccaatagggactttccattgacgtcaatgggtggagtatttacggtaaactgcccacttggcagtacatcaagtgtatcatatgccaagtacgccccctattgacgtcaatgacggtaaatggcccgcctggcattatgcccagtacatgaccttatgggactttcctacttggcagtacatctacgtattagtcatcgctattaccatggtgatgcggttttggcagtacatcaatgggcgtggatagcggtttgactcacggggatttccaagtctccaccccattgacgtcaatgggagtttgttttggcaccaaaatcaacgggactttccaaaatgtcgtaacaactccgccccattgacgcaaatgggcggtaggcgtgtacggtgggaggtctatataagcagagctctctggctaactagagaacccactgcttactggcttatcgaaattaatacgactcactatagggagacccaagctggctagcgtttaaacttaagcttggtaccgagctcggatccgccaccatgggcaaacggacagccgacggaagcgagttcgagtcaccgaaaaagaagcgaaaagttggctccggaatgggcaccaagtccgagctgatcgagagactggctacacagcagagccacatccccgccaagaccgtggaagatgccgtgaaggagatgctggaacacatggccagcaccctggcccagggcgaaagaatcgagatcagaggctttggcagcttcagcctgcactatagagcccctagaaccggcagaaatcctaagaccggagataaggtggaactggaaggcaagtacgtgcctcatttcaagcccggcaaagaactgagagatagagctaatatctacggctgatctagagggcccgtttaaacccgctgatcagcctcgactgtgccttctagttgccagccatctgttgtttgcccctcccccgtgccttccttgaccctggaaggtgccactcccactgtcctttcctaataaaatgaggaaattgcatcgcattgtctgagtaggtgtcattctattctggggggtggggtggggcaggacagcaagggggaggattgggaagacaatagcaggcatgctggggatgcggtgggctctatggcttctgaggcggaaagaaccagctggggctctagggggtatccccacgcgccctgtagcggcgcattaagcgcggcgggtgtggtggttacgcgcagcgtgaccgctacacttgccagcgccctagcgcccgctcctttcgctttcttcccttcctttctcgccacgttcgccggctttccccgtcaagctctaaatcgggggctccctttagggttccgatttagtgctttacggcacctcgaccccaaaaaacttgattagggtgatggttcacgtagtgggccatcgccctgatagacggtttttcgccctttgacgttggagtccacgttctttaatagtggactcttgttccaaactggaacaacactcaaccctatctcggtctattcttttgatttataagggattttgccgatttcggcctattggttaaaaaatgagctgatttaacaaaaatttaacgcgaattaattctgtggaatgtgtgtcagttagggtgtggaaagtccccaggctccccagcaggcagaagtatgcaaagcatgcatctcaattagtcagcaaccaggtgtggaaagtccccaggctccccagcaggcagaagtatgcaaagcatgcatctcaattagtcagcaaccatagtcccgcccctaactccgcccatcccgcccctaactccgcccagttccgcccattctccgccccatggctgactaattttttttatttatgcagaggccgaggccgcctctgcctctgagctattccagaagtagtgaggaggcttttttggaggcctaggcttttgcaaaaagctcccgggagcttgtatatccattttcggatctgatcaagagacaggatgaggatcgtttcgcatgattgaacaagatggattgcacgcaggttctccggccgcttgggtggagaggctattcggctatgactgggcacaacagacaatcggctgctctgatgccgccgtgttccggctgtcagcgcaggggcgcccggttctttttgtcaagaccgacctgtccggtgccctgaatgaactgcaggacgaggcagcgcggctatcgtggctggccacgacgggcgttccttgcgcagctgtgctcgacgttgtcactgaagcgggaagggactggctgctattgggcgaagtgccggggcaggatctcctgtcatctcaccttgctcctgccgagaaagtatccatcatggctgatgcaatgcggcggctgcatacgcttgatccggctacctgcccattcgaccaccaagcgaaacatcgcatcgagcgagcacgtactcggatggaagccggtcttgtcgatcaggatgatctggacgaagagcatcaggggctcgcgccagccgaactgttcgccaggctcaaggcgcgcatgcccgacggcgaggatctcgtcgtgacccatggcgatgcctgcttgccgaatatcatggtggaaaatggccgcttttctggattcatcgactgtggccggctgggtgtggcggaccgctatcaggacatagcgttggctacccgtgatattgctgaagagcttggcggcgaatgggctgaccgcttcctcgtgctttacggtatcgccgctcccgattcgcagcgcatcgccttctatcgccttcttgacgagttcttctgagcgggactctggggttcgaaatgaccgaccaagcgacgcccaacctgccatcacgagatttcgattccaccgccgccttctatgaaaggttgggcttcggaatcgttttccgggacgccggctggatgatcctccagcgcggggatctcatgctggagttcttcgcccaccccaacttgtttattgcagcttataatggttacaaataaagcaatagcatcacaaatttcacaaataaagcatttttttcactgcattctagttgtggtttgtccaaactcatcaatgtatcttatcatgtctgtataccgtcgacctctagctagagcttggcgtaatcatggtcatagctgtttcctgtgtgaaattgttatccgctcacaattccacacaacatacgagccggaagcataaagtgtaaagcctggggtgcctaatgagtgagctaactcacattaattgcgttgcgctcactgcccgctttccagtcgggaaacctgtcgtgccagctgcattaatgaatcggccaacgcgcggggagaggcggtttgcgtattgggcgctcttccgcttcctcgctcactgactcgctgcgctcggtcgttcggctgcggcgagcggtatcagctcactcaaaggcggtaatacggttatccacagaatcaggggataacgcaggaaagaacatgtgagcaaaaggccagcaaaaggccaggaaccgtaaaaaggccgcgttgctggcgtttttccataggctccgcccccctgacgagcatcacaaaaatcgacgctcaagtcagaggtggcgaaacccgacaggactataaagataccaggcgtttccccctggaagctccctcgtgcgctctcctgttccgaccctgccgcttaccggatacctgtccgcctttctcccttcgggaagcgtggcgctttctcatagctcacgctgtaggtatctcagttcggtgtaggtcgttcgctccaagctgggctgtgtgcacgaaccccccgttcagcccgaccgctgcgccttatccggtaactatcgtcttgagtccaacccggtaagacacgacttatcgccactggcagcagccactggtaacaggattagcagagcgaggtatgtaggcggtgctacagagttcttgaagtggtggcctaactacggctacactagaagaacagtatttggtatctgcgctctgctgaagccagttaccttcggaaaaagagttggtagctcttgatccggcaaacaaaccaccgctggtagcggtttttttgtttgcaagcagcagattacgcgcagaaaaaaaggatctcaagaagatcctttgatcttttctacggggtctgacgctcagtggaacgaaaactcacgttaagggattttggtcatgagattatcaaaaaggatcttcacctagatccttttaaattaaaaatgaagttttaaatcaatctaaagtatatatgagtaaacttggtctgacagttaccaatgcttaatcagtgaggcacctatctcagcgatctgtctatttcgttcatccatagttgcctgactccccgtcgtgtagataactacgatacgggagggcttaccatctggccccagtgctgcaatgataccgcgagacccacgctcaccggctccagatttatcagcaataaaccagccagccggaagggccgagcgcagaagtggtcctgcaactttatccgcctccatccagtctattaattgttgccgggaagctagagtaagtagttcgccagttaatagtttgcgcaacgttgttgccattgctacaggcatcgtggtgtcacgctcgtcgtttggtatggcttcattcagctccggttcccaacgatcaaggcgagttacatgatcccccatgttgtgcaaaaaagcggttagctccttcggtcctccgatcgttgtcagaagtaagttggccgcagtgttatcactcatggttatggcagcactgcataattctcttactgtcatgccatccgtaagatgcttttctgtgactggtgagtactcaaccaagtcattctgagaatagtgtatgcggcgaccgagttgctcttgcccggcgtcaatacgggataataccgcgccacatagcagaactttaaaagtgctcatcattggaaaacgttcttcggggcgaaaactctcaaggatcttaccgctgttgagatccagttcgatgtaacccactcgtgcacccaactgatcttcagcatcttttactttcaccagcgtttctgggtgagcaaaaacaggaaggcaaaatgccgcaaaaaagggaataagggcgacacggaaatgttgaatactcatactcttcctttttcaatattattgaagcatttatcagggttattgtctcatgagcggatacatatttgaatgtatttagaaaaataaacaaataggggttccgcgcacatttccccgaaaagtgccacctgacgtc

SEQ ID NO: 5222 - DNA, 6032 bp, synthetic construct
  source 1..6032: mol_type = other DNA
gacggatcgggagatctcccgatcccctatggtgcactctcagtacaatctgctctgatgccgcatagttaagccagtatctgctccctgcttgtgtgttggaggtcgctgagtagtgcgcgagcaaaatttaagctacaacaaggcaaggcttgaccgacaattgcatgaagaatctgcttagggttaggcgttttgcgctgcttcgcgatgtacgggccagatatacgcgttgacattgattattgactagttattaatagtaatcaattacggggtcattagttcatagcccatatatggagttccgcgttacataacttacggtaaatggcccgcctggctgaccgcccaacgacccccgcccattgacgtcaataatgacgtatgttcccatagtaacgccaatagggactttccattgacgtcaatgggtggagtatttacggtaaactgcccacttggcagtacatcaagtgtatcatatgccaagtacgccccctattgacgtcaatgacggtaaatggcccgcctggcattatgcccagtacatgaccttatgggactttcctacttggcagtacatctacgtattagtcatcgctattaccatggtgatgcggttttggcagtacatcaatgggcgtggatagcggtttgactcacggggatttccaagtctccaccccattgacgtcaatgggagtttgttttggcaccaaaatcaacgggactttccaaaatgtcgtaacaactccgccccattgacgcaaatgggcggtaggcgtgtacggtgggaggtctatataagcagagctctctggctaactagagaacccactgcttactggcttatcgaaattaatacgactcactatagggagacccaagctggctagcgtttaaacttaagcttggtaccgagctcggatccgccaccatgggcaaacggacagccgacggaagcgagttcgagtcaccgaaaaagaagcgaaaagttggctccggaatgggcaccaagtccgagctgatcgagagactggctacacagcagagccacatccccgccaagaccgtggaagatgccgtgaaggagatgctggaacacatggccagcaccctggcccagggcggctccggcggcctgacaaaggccgagatgagcgagtacctgtttgacaagctgggcctgtctaagcgggacgccaaagagctggtcgagctgttcttcgaggaaattcggcgggccctggaaaacggcgagcaagtgaaactcagcggcttcggcaacttcgacctgcgggacaagaaccagcgcccaggaagaaaccccaagacaggcgaggacatccctatcaccgctagaagggttgtgaccttcagacctggacagaaactgaagtctcgggtggagaacgccggcggaggagaaagaatcgagatcagaggctttggcagcttcagcctgcactatagagcccctagaaccggcagaaatcctaagaccggagataaggtggaactggaaggcaagtacgtgcctcatttcaagcccggcaaagaactgagagatagagctaatatctacggctgatctagagggcccgtttaaacccgctgatcagcctcgactgtgccttctagttgccagccatctgttgtttgcccctcccccgtgccttccttgaccctggaaggtgccactcccactgtcctttcctaataaaatgaggaaattgcatcgcattgtctgagtaggtgtcattctattctggggggtggggtggggcaggacagcaagggggaggattgggaagacaatagcaggcatgctggggatgcggtgggctctatggcttctgaggcggaaagaaccagctggggctctagggggtatccccacgcgccctgtagcggcgcattaagcgcggcgggtgtggtggttacgcgcagcgtgaccgctacacttgccagcgccctagcgcccgctcctttcgctttcttcccttcctttctcgccacgttcgccggctttccccgtcaagctctaaatcgggggctccctttagggttccgatttagtgctttacggcacctcgaccccaaaaaacttgattagggtgatggttcacgtagtgggccatcgccctgatagacggtttttcgccctttgacgttggagtccacgttctttaatagtggactcttgttccaaactggaacaacactcaaccctatctcggtctattcttttgatttataagggattttgccgatttcggcctattggttaaaaaatgagctgatttaacaaaaatttaacgcgaattaattctgtggaatgtgtgtcagttagggtgtggaaagtccccaggctccccagcaggcagaagtatgcaaagcatgcatctcaattagtcagcaaccaggtgtggaaagtccccaggctccccagcaggcagaagtatgcaaagcatgcatctcaattagtcagcaaccatagtcccgcccctaactccgcccatcccgcccctaactccgcccagttccgcccattctccgccccatggctgactaattttttttatttatgcagaggccgaggccgcctctgcctctgagctattccagaagtagtgaggaggcttttttggaggcctaggcttttgcaaaaagctcccgggagcttgtatatccattttcggatctgatcaagagacaggatgaggatcgtttcgcatgattgaacaagatggattgcacgcaggttctccggccgcttgggtggagaggctattcggctatgactgggcacaacagacaatcggctgctctgatgccgccgtgttccggctgtcagcgcaggggcgcccggttctttttgtcaagaccgacctgtccggtgccctgaatgaactgcaggacgaggcagcgcggctatcgtggctggccacgacgggcgttccttgcgcagctgtgctcgacgttgtcactgaagcgggaagggactggctgctattgggcgaagtgccggggcaggatctcctgtcatctcaccttgctcctgccgagaaagtatccatcatggctgatgcaatgcggcggctgcatacgcttgatccggctacctgcccattcgaccaccaagcgaaacatcgcatcgagcgagcacgtactcggatggaagccggtcttgtcgatcaggatgatctggacgaagagcatcaggggctcgcgccagccgaactgttcgccaggctcaaggcgcgcatgcccgacggcgaggatctcgtcgtgacccatggcgatgcctgcttgccgaatatcatggtggaaaatggccgcttttctggattcatcgactgtggccggctgggtgtggcggaccgctatcaggacatagcgttggctacccgtgatattgctgaagagcttggcggcgaatgggctgaccgcttcctcgtgctttacggtatcgccgctcccgattcgcagcgcatcgccttctatcgccttcttgacgagttcttctgagcgggactctggggttcgaaatgaccgaccaagcgacgcccaacctgccatcacgagatttcgattccaccgccgccttctatgaaaggttgggcttcggaatcgttttccgggacgccggctggatgatcctccagcgcggggatctcatgctggagttcttcgcccaccccaacttgtttattgcagcttataatggttacaaataaagcaatagcatcacaaatttcacaaataaagcatttttttcactgcattctagttgtggtttgtccaaactcatcaatgtatcttatcatgtctgtataccgtcgacctctagctagagcttggcgtaatcatggtcatagctgtttcctgtgtgaaattgttatccgctcacaattccacacaacatacgagccggaagcataaagtgtaaagcctggggtgcctaatgagtgagctaactcacattaattgcgttgcgctcactgcccgctttccagtcgggaaacctgtcgtgccagctgcattaatgaatcggccaacgcgcggggagaggcggtttgcgtattgggcgctcttccgcttcctcgctcactgactcgctgcgctcggtcgttcggctgcggcgagcggtatcagctcactcaaaggcggtaatacggttatccacagaatcaggggataacgcaggaaagaacatgtgagcaaaaggccagcaaaaggccaggaaccgtaaaaaggccgcgttgctggcgtttttccataggctccgcccccctgacgagcatcacaaaaatcgacgctcaagtcagaggtggcgaaacccgacaggactataaagataccaggcgtttccccctggaagctccctcgtgcgctctcctgttccgaccctgccgcttaccggatacctgtccgcctttctcccttcgggaagcgtggcgctttctcatagctcacgctgtaggtatctcagttcggtgtaggtcgttcgctccaagctgggctgtgtgcacgaaccccccgttcagcccgaccgctgcgccttatccggtaactatcgtcttgagtccaacccggtaagacacgacttatcgccactggcagcagccactggtaacaggattagcagagcgaggtatgtaggcggtgctacagagttcttgaagtggtggcctaactacggctacactagaagaacagtatttggtatctgcgctctgctgaagccagttaccttcggaaaaagagttggtagctcttgatccggcaaacaaaccaccgctggtagcggtttttttgtttgcaagcagcagattacgcgcagaaaaaaaggatctcaagaagatcctttgatcttttctacggggtctgacgctcagtggaacgaaaactcacgttaagggattttggtcatgagattatcaaaaaggatcttcacctagatccttttaaattaaaaatgaagttttaaatcaatctaaagtatatatgagtaaacttggtctgacagttaccaatgcttaatcagtgaggcacctatctcagcgatctgtctatttcgttcatccatagttgcctgactccccgtcgtgtagataactacgatacgggagggcttaccatctggccccagtgctgcaatgataccgcgagacccacgctcaccggctccagatttatcagcaataaaccagccagccggaagggccgagcgcagaagtggtcctgcaactttatccgcctccatccagtctattaattgttgccgggaagctagagtaagtagttcgccagttaatagtttgcgcaacgttgttgccattgctacaggcatcgtggtgtcacgctcgtcgtttggtatggcttcattcagctccggttcccaacgatcaaggcgagttacatgatcccccatgttgtgcaaaaaagcggttagctccttcggtcctccgatcgttgtcagaagtaagttggccgcagtgttatcactcatggttatggcagcactgcataattctcttactgtcatgccatccgtaagatgcttttctgtgactggtgagtactcaaccaagtcattctgagaatagtgtatgcggcgaccgagttgctcttgcccggcgtcaatacgggataataccgcgccacatagcagaactttaaaagtgctcatcattggaaaacgttcttcggggcgaaaactctcaaggatcttaccgctgttgagatccagttcgatgtaacccactcgtgcacccaactgatcttcagcatcttttactttcaccagcgtttctgggtgagcaaaaacaggaaggcaaaatgccgcaaaaaagggaataagggcgacacggaaatgttgaatactcatactcttcctttttcaatattattgaagcatttatcagggttattgtctcatgagcggatacatatttgaatgtatttagaaaaataaacaaataggggttccgcgcacatttccccgaaaagtgccacctgacgtc

SEQ ID NO: 5223 - DNA, 5951 bp, synthetic construct
  source 1..5951: mol_type = other DNA
gacggatcgggagatctcccgatcccctatggtgcactctcagtacaatctgctctgatgccgcatagttaagccagtatctgctccctgcttgtgtgttggaggtcgctgagtagtgcgcgagcaaaatttaagctacaacaaggcaaggcttgaccgacaattgcatgaagaatctgcttagggttaggcgttttgcgctgcttcgcgatgtacgggccagatatacgcgttgacattgattattgactagttattaatagtaatcaattacggggtcattagttcatagcccatatatggagttccgcgttacataacttacggtaaatggcccgcctggctgaccgcccaacgacccccgcccattgacgtcaataatgacgtatgttcccatagtaacgccaatagggactttccattgacgtcaatgggtggagtatttacggtaaactgcccacttggcagtacatcaagtgtatcatatgccaagtacgccccctattgacgtcaatgacggtaaatggcccgcctggcattatgcccagtacatgaccttatgggactttcctacttggcagtacatctacgtattagtcatcgctattaccatggtgatgcggttttggcagtacatcaatgggcgtggatagcggtttgactcacggggatttccaagtctccaccccattgacgtcaatgggagtttgttttggcaccaaaatcaacgggactttccaaaatgtcgtaacaactccgccccattgacgcaaatgggcggtaggcgtgtacggtgggaggtctatataagcagagctctctggctaactagagaacccactgcttactggcttatcgaaattaatacgactcactatagggagacccaagctggctagcgtttaaacttaagcttggtaccgccaccatgggcaccaagtccgagctgatcgagagactggctacacagcagagccacatccccgccaagaccgtggaagatgccgtgaaggagatgctggaacacatggccagcaccctggcccagggcggctccggcggcctgacaaaggccgagatgagcgagtacctgtttgacaagctgggcctgtctaagcgggacgccaaagagctggtcgagctgttcttcgaggaaattcggcgggccctggaaaacggcgagcaagtgaaactcagcggcttcggcaacttcgacctgcgggacaagaaccagcgcccaggaagaaaccccaagacaggcgaggacatccctatcaccgctagaagggttgtgaccttcagacctggacagaaactgaagtctcgggtggagaacgccggcggaggagaaagaatcgagatcagaggctttggcagcttcagcctgcactatagagcccctagaaccggcagaaatcctaagaccggagataaggtggaactggaaggcaagtacgtgcctcatttcaagcccggcaaagaactgagagatagagctaatatctacggctgatctagagggcccgtttaaacccgctgatcagcctcgactgtgccttctagttgccagccatctgttgtttgcccctcccccgtgccttccttgaccctggaaggtgccactcccactgtcctttcctaataaaatgaggaaattgcatcgcattgtctgagtaggtgtcattctattctggggggtggggtggggcaggacagcaagggggaggattgggaagacaatagcaggcatgctggggatgcggtgggctctatggcttctgaggcggaaagaaccagctggggctctagggggtatccccacgcgccctgtagcggcgcattaagcgcggcgggtgtggtggttacgcgcagcgtgaccgctacacttgccagcgccctagcgcccgctcctttcgctttcttcccttcctttctcgccacgttcgccggctttccccgtcaagctctaaatcgggggctccctttagggttccgatttagtgctttacggcacctcgaccccaaaaaacttgattagggtgatggttcacgtagtgggccatcgccctgatagacggtttttcgccctttgacgttggagtccacgttctttaatagtggactcttgttccaaactggaacaacactcaaccctatctcggtctattcttttgatttataagggattttgccgatttcggcctattggttaaaaaatgagctgatttaacaaaaatttaacgcgaattaattctgtggaatgtgtgtcagttagggtgtggaaagtccccaggctccccagcaggcagaagtatgcaaagcatgcatctcaattagtcagcaaccaggtgtggaaagtccccaggctccccagcaggcagaagtatgcaaagcatgcatctcaattagtcagcaaccatagtcccgcccctaactccgcccatcccgcccctaactccgcccagttccgcccattctccgccccatggctgactaattttttttatttatgcagaggccgaggccgcctctgcctctgagctattccagaagtagtgaggaggcttttttggaggcctaggcttttgcaaaaagctcccgggagcttgtatatccattttcggatctgatcaagagacaggatgaggatcgtttcgcatgattgaacaagatggattgcacgcaggttctccggccgcttgggtggagaggctattcggctatgactgggcacaacagacaatcggctgctctgatgccgccgtgttccggctgtcagcgcaggggcgcccggttctttttgtcaagaccgacctgtccggtgccctgaatgaactgcaggacgaggcagcgcggctatcgtggctggccacgacgggcgttccttgcgcagctgtgctcgacgttgtcactgaagcgggaagggactggctgctattgggcgaagtgccggggcaggatctcctgtcatctcaccttgctcctgccgagaaagtatccatcatggctgatgcaatgcggcggctgcatacgcttgatccggctacctgcccattcgaccaccaagcgaaacatcgcatcgagcgagcacgtactcggatggaagccggtcttgtcgatcaggatgatctggacgaagagcatcaggggctcgcgccagccgaactgttcgccaggctcaaggcgcgcatgcccgacggcgaggatctcgtcgtgacccatggcgatgcctgcttgccgaatatcatggtggaaaatggccgcttttctggattcatcgactgtggccggctgggtgtggcggaccgctatcaggacatagcgttggctacccgtgatattgctgaagagcttggcggcgaatgggctgaccgcttcctcgtgctttacggtatcgccgctcccgattcgcagcgcatcgccttctatcgccttcttgacgagttcttctgagcgggactctggggttcgaaatgaccgaccaagcgacgcccaacctgccatcacgagatttcgattccaccgccgccttctatgaaaggttgggcttcggaatcgttttccgggacgccggctggatgatcctccagcgcggggatctcatgctggagttcttcgcccaccccaacttgtttattgcagcttataatggttacaaataaagcaatagcatcacaaatttcacaaataaagcatttttttcactgcattctagttgtggtttgtccaaactcatcaatgtatcttatcatgtctgtataccgtcgacctctagctagagcttggcgtaatcatggtcatagctgtttcctgtgtgaaattgttatccgctcacaattccacacaacatacgagccggaagcataaagtgtaaagcctggggtgcctaatgagtgagctaactcacattaattgcgttgcgctcactgcccgctttccagtcgggaaacctgtcgtgccagctgcattaatgaatcggccaacgcgcggggagaggcggtttgcgtattgggcgctcttccgcttcctcgctcactgactcgctgcgctcggtcgttcggctgcggcgagcggtatcagctcactcaaaggcggtaatacggttatccacagaatcaggggataacgcaggaaagaacatgtgagcaaaaggccagcaaaaggccaggaaccgtaaaaaggccgcgttgctggcgtttttccataggctccgcccccctgacgagcatcacaaaaatcgacgctcaagtcagaggtggcgaaacccgacaggactataaagataccaggcgtttccccctggaagctccctcgtgcgctctcctgttccgaccctgccgcttaccggatacctgtccgcctttctcccttcgggaagcgtggcgctttctcatagctcacgctgtaggtatctcagttcggtgtaggtcgttcgctccaagctgggctgtgtgcacgaaccccccgttcagcccgaccgctgcgccttatccggtaactatcgtcttgagtccaacccggtaagacacgacttatcgccactggcagcagccactggtaacaggattagcagagcgaggtatgtaggcggtgctacagagttcttgaagtggtggcctaactacggctacactagaagaacagtatttggtatctgcgctctgctgaagccagttaccttcggaaaaagagttggtagctcttgatccggcaaacaaaccaccgctggtagcggtttttttgtttgcaagcagcagattacgcgcagaaaaaaaggatctcaagaagatcctttgatcttttctacggggtctgacgctcagtggaacgaaaactcacgttaagggattttggtcatgagattatcaaaaaggatcttcacctagatccttttaaattaaaaatgaagttttaaatcaatctaaagtatatatgagtaaacttggtctgacagttaccaatgcttaatcagtgaggcacctatctcagcgatctgtctatttcgttcatccatagttgcctgactccccgtcgtgtagataactacgatacgggagggcttaccatctggccccagtgctgcaatgataccgcgagacccacgctcaccggctccagatttatcagcaataaaccagccagccggaagggccgagcgcagaagtggtcctgcaactttatccgcctccatccagtctattaattgttgccgggaagctagagtaagtagttcgccagttaatagtttgcgcaacgttgttgccattgctacaggcatcgtggtgtcacgctcgtcgtttggtatggcttcattcagctccggttcccaacgatcaaggcgagttacatgatcccccatgttgtgcaaaaaagcggttagctccttcggtcctccgatcgttgtcagaagtaagttggccgcagtgttatcactcatggttatggcagcactgcataattctcttactgtcatgccatccgtaagatgcttttctgtgactggtgagtactcaaccaagtcattctgagaatagtgtatgcggcgaccgagttgctcttgcccggcgtcaatacgggataataccgcgccacatagcagaactttaaaagtgctcatcattggaaaacgttcttcggggcgaaaactctcaaggatcttaccgctgttgagatccagttcgatgtaacccactcgtgcacccaactgatcttcagcatcttttactttcaccagcgtttctgggtgagcaaaaacaggaaggcaaaatgccgcaaaaaagggaataagggcgacacggaaatgttgaatactcatactcttcctttttcaatattattgaagcatttatcagggttattgtctcatgagcggatacatatttgaatgtatttagaaaaataaacaaataggggttccgcgcacatttccccgaaaagtgccacctgacgtc

SEQ ID NO: 5224 - DNA, 12791 bp, synthetic construct
  source 1..12791: mol_type = other DNA
tcacgtagtggacaaattcttccaactgatctgcgcgcgaggccaagcgatcttcttcttgtccaagataagcctgtctagcttcaagtatgacgggctgatactgggccggcaggcgctccattgcccagtcggcagcgacatccttcggcgcgattttgccggttactgcgctgtaccaaatgcgggacaacgtaagcactacatttcgctcatcgccagcccagtcgggcggcgagttccatagcgttaaggtttcatttagcgcctcaaatagatcctgttcaggaaccggatcaaagagttcctccgccgctggacctaccaaggcaacgctatgttctcttgcttttgtcagcaagatagccagatcaatgtcgatcgtggctggctcgaagatacctgcaagaatgtcattgcgctgccattctccaaattgcagttcgcgcttagctggataacgccacggaatgatgtcgtcgtgcacaacaatggtgacttctacagcgcggagaatctcgctctctccaggggaagccgaagtttccaaaaggtcgttgatcaaagctcgccgcgttgtttcatcaagccttacggtcaccgtaaccagcaaatcaatatcactgtgtggcttcaggccgccatccactgcggagccgtacaaatgtacggccagcaacgtcggttcgagatggcgctcgatgacgccaactacctctgatagttgagtcgatacttcggcgatcaccgcttccctcatactcttcctttttcaatattattgaagcatttatcagggttattgtctcatgagcggatacatatttgaatgtatttagaaaaataaacaaatagctagctcactcggtcgctacgctccgggcgtgagactgcggcgggcgctgcggacacatacaaagttacccacagattccgtggataagcaggggactaacatgtgaggcaaaacagcagggccgcgccggtggcgtttttccataggctccgccctcctgccagagttcacataaacagacgcttttccggtgcatctgtgggagccgtgaggctcaaccatgaatctgacagtacgggcgaaacccgacaggacttaaagatccccaccgtttccggcgggtcgctccctcttgcgctctcctgttccgaccctgccgtttaccggatacctgttccgcctttctcccttacgggaagtgtggcgctttctcatagctcacacactggtatctcggctcggtgtaggtcgttcgctccaagctgggctgtaagcaagaactccccgttcagcccgactgctgcgccttatccggtaactgttcacttgagtccaacccggaaaagcacggtaaaacgccactggcagcagccattggtaactgggagttcgcagaggatttgtttagctaaacacgcggttgctcttgaagtgtgcgccaaagtccggctacactggaaggacagatttggttgctgtgctctgcgaaagccagttaccacggttaagcagttccccaactgacttaaccttcgatcaaaccacctccccaggtggttttttcgtttacagggcaaaagattacgcgcagaaaaaaaggatctcaagaagatcctttgatcttttctactgaaccgctctagatttcagtgcaatttatctcttcaaatgtagcacctgaagtcagccccatacgatataagttgtaattctcatgttagtcatgccccgcgcccaccggaaggagctgactgggttgaaggctctcaagggcatcggtcgagatcccggtgcctaatgagtgagctaacttacattaattgcgttgcgctcactgcccgctttccagtcgggaaacctgtcgtgccagctgcattaatgaatcggccaacgcgcggggagaggcggtttgcgtattgggcgccagggtggtttttcttttcaccagtgagacgggcaacagctgattgcccttcaccgcctggccctgagagagttgcagcaagcggtccacgctggtttgccccagcaggcgaaaatcctgtttgatggtggttaacggcgggatataacatgagctgtcttcggtatcgtcgtatcccactaccgagatgtccgcaccaacgcgcagcccggactcggtaatggcgcgcattgcgcccagcgccatctgatcgttggcaaccagcatcgcagtgggaacgatgccctcattcagcatttgcatggtttgttgaaaaccggacatggcactccagtcgccttcccgttccgctatcggctgaatttgattgcgagtgagatatttatgccagccagccagacgcagacgcgccgagacagaacttaatgggcccgctaacagcgcgatttgctggtgacccaatgcgaccagatgctccacgcccagtcgcgtaccgtcttcatgggagaaaataatactgttgatgggtgtctggtcagagacatcaagaaataacgccggaacattagtgcaggcagcttccacagcaatggcatcctggtcatccagcggatagttaatgatcagcccactgacgcgttgcgcgagaagattgtgcaccgccgctttacaggcttcgacgccgcttcgttctaccatcgacaccaccacgctggcacccagttgatcggcgcgagatttaatcgccgcgacaatttgcgacggcgcgtgcagggccagactggaggtggcaacgccaatcagcaacgactgtttgcccgccagttgttgtgccacgcggttgggaatgtaattcagctccgccatcgccgcttccactttttcccgcgttttcgcagaaacgtggctggcctggttcaccacgcgggaaacggtctgataagagacaccggcatactctgcgacatcgtataacgttactggtttcacattcaccaccctgaattgactctcttccgggcgctatcatgccataccgcgaaaggttttgcgccattcgatggtgtccgggatctcgacgctctcccttatgcgactcctgcattaggaaattaatacgactcactataggggaattgtgagcggataacaattcccctgtagaaataattttgtttaactttaataaggagatataccatgggtgacctgccgtataggcagctgaaaatagtacagcgcggctgaaatcatcattaaagcggtgacctgccgtataggcagctgaaaattagcgaattccgagcgaaggagatatacatatggcttttctattttctcccaaggctcgggcattttctgacgaatcgctggaaagttacttgttacgggtcgtttcagagaatttttttgactcgtatgaagggctcagcttagctattcgcgaagagctgcatgagcttgattttgaggcgcatggtgcattcccagtagatttaaagaggctcaatgtttaccacgccaaacataatagccattttaggatgcgggctttaggactactcgaaacactactagatttacctcgatacgagctacaaaagttggctttgctaaagtcagatattaaatttaactcctccgtcgctttatataacaatggcgtagacattcccctgaggtttattcgtcaccacgccgaggaagctgttgattcgattccggtatgctcacaatgtcttgcagaagaagcctatataaaacaaagttggcatataaagtgggtaaatgcatgcactaaacatcagtgtgctttgctacataactgcccagaatgctacgctccaattaactatatcgagaatgagtcaattactcattgttcatgcggttttgagctgtcttgcgctagtacctcgcctgtaaatacgttaagtattgaacatttaaataaattactggataaaggtgagcgcaacgatagtaacccgctatttaacaatatgactcttacagaacgttttgctgcgcttctttggtatcaggagcggtattctcaaacagataacttttgtttaaatgatgctgtgaactattttagtaaatggccagcagtttttaatacagagcttgatgaactaagtaaaaatgcagaaatgaagttaatagatctgtttaataaaactgagtttaagtttatttttggggatgctattttagcttgccccagtactcaaaagcagagtgaatctcactttatttatagggctctattagattatttagttactttagttgagagtaaccctaaaactaaaaagcccaacgcagccgacttattagtaagtgtattggaggctgcaactttattaggtacttcagtagagcaggtttataggttgtaccaaaatggtattttgcaaacggcatttcgtcataaaatgaaccagcggatcaacccttataagggcgcgttttttttaagacatgttatagagtacaaaaccagttttggaaatgacaaagctagaatgtatttgtcggcatggtgagtatatgcatcttaaggaactgctagagattacagacaccactgagcgggataggtcattacgtcgtgcttttagcccttatacggcaatgattgatataacaggcagcgaagccgttgccctgattattttgttaaacctgacttatcgaaaaaaccaagttgatgacttgctggataaaaagctcgcaaaacaggctttaaaaagtgaagaccatattaataaatgtattaaggaaatagcgtggtttcatactcataatttaaagtaccctgacattagagtcagtaagcaaaatttagccgtagagcctccaacactgcactcttatgttttgagtagtgctaactatcctaaagcctatggctggtcacataactcagctaaagttaattttgctaaattatttgttagttactttaaatggcaaaatcaagtcagttggctggcacaagtattagctacgaactcggataactggaaatccgcatttacctctcttgggttatccgttaaggcatttaaaagtttatgtgtaaccgttaaaaattcattgcctgaagaggccattcccgactctgttgaccgctactctcgccaaattagaatgccttatcatgatggttacttagctgttacgcctgtaattagccatgttgttcaatcaaaaattcaacaggcggcaattgataaacgagcccgatttagcaatgtagagtttacgcgtcctgctgctgtcagtatgttagctgcttccttaggtggtgttattaatgtgcttaattaccctccttatatacgaagtaaatatcatggtttaagtaactcacgagcatttaaattaaataatgggcaaacagtatttaacgttgaggcactattaaagccggaattaattaaagccttagaaggtattatatttagtaataatgcgctggctcttaaacagcgtagacaacaaaaagtaaaaaatattaaagagctgagaaacacgcttttagaatggttttcacctgtatttgaatggcgcttggacgctattgagaatgggtatgacttagaacagcttgagagtgcttcagagcgactagagtataaaatactatcgctacccgacaatgaactcccttcgctaacgattcctttatttaggttactaaatgaaatgcttggcggtgtgagcatgacacaaaggtatgcttttcatcctaaattaatgagccctttaaaagcagctttacaatggttgcttgttaatcttacagatcaaaaacatgtactgattgaagaagatgatgaacattatcgctatcttcatttaagcggtatacgtgtgtttgatgcgcaagcattatcaaacccttactgctcaggtattccatctttaaccgctgtttggggtatgattcacagctaccaaagaaaacttaatgaggcgctaggaacaaatgtacggttcacatccttttcttggtttattaggaattattctgctgtagcaggaaaaaaacttcctgaactgagccttcaaggcgctcagcaaagtaggctcaagcggccaggaattatcgatggcaaatactgtgatttggtatttgatttaataatacacattgatggttatgaagatgacttacaggcagtagatagtaagcctgacattttgaaagcgcattttccatctaactttgcaggtggtgttatgcatcagcctgagcttaactcaaatataaattggtgctgtttatatagtaatgaaaatcagttatttgaaaagttaaggcgactccctttatctggttgttgggttatgccaactgagcacaaaatacaggatttagatgagctactcttattattaaatagtgactctaaactaagcccatctatgatgggatatatgttactcaccgaaccgatggctagagttggatcacttgaaagactgcattgttatgctgaaccagcaataggagtggtgaaatacgaagcggccactagtgtaaggctaaaaggtattggtaactattttaatagcgctttttggatgctagatgcacaagaaaagtttatgctaatgaaaaaagtttaaccggaaaatacttaatggagctctgtaatatattaaaatatgatcgctcgctttaccctggtaaagctgtgtttttttataaaacggctgactctgattttgttccactagaggctgatattaataaaattcgaggccctaaatctggttttactgaagcattcaccccacagttttccccaaaaaacatctcacctcaggacttaacacataataatatattaactctcgaagagtgttatgtacctccaaatgtggagcatatattttgtcggttttctttgagagtacaggctaactcgttggtcccttcaggctgtagtgatccagaggttttttctttattaaaagagttggcagaaacatttaaagaatgcggtggttataaagaactagcagtaagatattgtcgaaatattttgataggtacatggctttggcgtaatcaaaacaccggcaacactcaaattgaaattaaaaccagcaaagggagttgttatttaatcgataacactcgtaagttagcttgggaaagcaaatgggcttctgatgatctaaaagtattggaagagcttagtaatgaaattgagagcgcattaactgatcccaatgtgttttggagtgctgatataaccgcgaaaatagaagcctcattttgccaagagatttacccaagccaaatccttaacgacaaggttaagcaaggagaggcctcaaaacagtttgtaaaagctaagtgtgcagatggccgttacgctgtaagttttaattcagtaaaaataggagcagcccttcagtcaatagatgattggtgggatgaggatgcaagtaaaagattacgagtgcatgagtttggtgctgataaagaaataggggttgcccgacgtcctcctgattctgaacagaatttttattctattttcaaaaatacggaatggtatttgtcagcccttaaaaattgcattactaataaaaatgaaaaaatagacccagctatttattacttattctctgtattgattaagggcggaatgttccagaaaaaagcagaggctaaaaaggcgtaattatgcaaaggtattacttcacagtccactttttaccaaaacaagctaatctagcgctgcttactggccgttgtatttctattatgcatgggtttattttgaagcataatattgaaggaatgggggttacgtttcctgcatggtcggactcatcaattggtaatgaaattgcttttgtttacacggacaaggagattttaaatacccttaaagatcaggcatattttgtggacatgcaagattgtggcttttttaaagtaagccaagttttagctgtacctgacagctgcgaagaagtacgttttatacgtaatcaggcggtagcaaaaattttcacaggtgaaagtagaagaagattaaagcgcctgcaaaaaagagcgttagcaagaggtgaagattttaatcctaaaaagatcgaagctccccgagagattgatattttccatagagtggctatgactagtaagagttcacaagaggattatattctgcatattcaaaagcaagatgttgactgccaagctgagccatactttagtaattatgggcttgcctcaaatgaaaagtttaaaggcacggttccggatttatcaccctcaatagatagaaattaacctttaataaggagatatagcatgtatatacgcaacttgagaaagccatctccaaataaaaatgtatttaaatttgcgagcactaaagttagtagtgtagttatgtgtgagagttcattagagtttgatgcatgttttcatcatgaatataacgatttgatagagagttttgggagtcagcctgaaggctttaaatatgagtttatgggtaaaagtttaccttacacaccagatgcactgatttcatatacagataaaacccaaaaataccacgaatataagccctattctaaaattgcttctccactatttagagctgaatttgctgccaaaagagctgcatcattaaaattggggattgatcttgttttagtaactgataggcaaattagggtaaatccaatattaaacaacttaaagttattacaccgctactcaggtgtttatggtatcagcggcattcaaaaagagttgctcagttttattcataaatcaggggtaatcaagctaaatgatataagctctcaggttgggataccaattggtgaaacacgatcttttttatttgggctcatgcataaagggttggttaaggctgatctagggtgtgatgatttaactaataatccaacattatgggctacaccaggcagcggctccggaaaacggacagccgacggaagcgagttcgagtcaccaaagaagaagcggaaagtcggatccggctctggaggcatgggaacaaaatcagaactaatagagaggttggctacccagcaaagccacatcccggcaaagacggtggaagatgccgtcaaggagatgctggagcacatggcgtccaccctggcgcaaggtgggtctggcggtttgaccaaagcggaaatgagcgaatatctgttcgacaagctcggcctgtcgaaacgtgacgcgaaagagttagttgagttgttcttcgaggaaatccgcagagcgctggagaacggcgaacaggttaaactgtccggtttcggcaattttgatctgcgcgacaagaaccagcgtccgggtcgcaacccgaaaaccggtgaggacatcccgattaccgcacgtcgtgtggttacctttcgcccaggtcagaaactgaaaagccgtgtggaaaatgcgggtggcggcgaacgtattgagatccgtggtttcggctcttttagcctgcattatcgtgctccgcgtaccggccgtaacccgaaaaccggtgataaggtggagttggaaggtaagtacgttccgcattttaaaccgggtaaagaactgcgtgatcgtgccaatatttacggctccggtagcgaaacgccggggacttctgaatctgctactccggaaagcggaggctctggctcgtcaggaggttcaggaagttcaggcggtatgactgacttttttaatgaatttgatgaaagcctggtaccattaaagccacaaacgcccacacaatacgtcaaattagatgatgccaacttaatccagcgtgatttggataccttttcagatacctttaaaaaccaagcactacaaaggtataagctaattagcactatagataaaaaactttcacgcggctggacccaacgaaatttagatcctattttagatgagctttttaaaggaggtgacgtagttcggccaaattggcgaactgttgctcgttggcgcaaaaaatatatcgaaagcaacggtgatatagcctcccttgctgataaaaaccacaaaatgggaaacagaactaaccgtataaaaggggatgataaattttttgataaagcattagaacgatttttagatgctaaaagacctactatagcaactgcatatcagtactataaagaccttattgttattgaaaatgagagtattgtcgaaggcaagattccaataatatcctacaatgcgtttaataaaagaatcaaagcaatacccccatacgcggtcgcggtcgcaaggcatggtaaatttaaagcagaccaatggtttgcttactgcgctgcgcacgtacccccgacaagaatattagagcgtgtagagattgatcatacaccacttgatttaatcctacttgatgatgagttacttattcccataggaagaccttacctaacattacttattgatgtatttagtggctgtgttcttggttttcatcttagttataaatccccttcctacgtatctgctgctaaggctattactcatgcgattaaaccaaagtctcttgatgctctgaatatagaactacaaaatgattggccttgctttggtaaatttgaaaatttagttgtagataatggtgctgagttttggtctaaaaacttagagcatgcttgtcagtcagcaggaataaatatccaatataaccctgtgcgcaagccttggctaaaaccctttatagagcgtttttttggggtgatgaatgaatatttcttacctgaattaccaggaaagacattttcaaatattttagaaaaagaagagtataaacctgagaaagatgcaattatgcgcttctcaacttttgttgaagaatttcaccgctggatcgcggatgtgtatcatcaagacagtaattcacgtgaaactcgaatcccaattaaacgttggcaacaagggtttgatgcatatcccccattgaccatgaatgaagaggaggaaacgcgtttttcaatgttaatgcgcatctcagactcaagaacgttaacgagaaatgggtttaaatatcaagagttaatgtatgactcaacagctttggctgattatcgtaaacattatccgcaaacaaaagaaactgtaaaaaaactgattaaagtagaccctgatgacatctcaaaaatttatgtttatttagaagagttagaaagttatctcgaagtaccgtgtacagatcctaccggctatacggatggtttaagtatctatgagcataaaacaataaaaaaaattaacagggaagtcatacgggaatctaaagatagtttgggcttagcgaaagcacgcatggctattcatgagcgagtaaagcaagagcaagaagttttcattgaatcaaaaactaaagctaagataacagctgttaaaaagcaagctcaaatagctgatgtaagtaatacaggaacgagcactattaaggtttctgaagaaagtgcagcccctgtgcaaaaacatataagtaacgataattctgacgactgggatgatgacttagaggcatttgaatgaatgccttaacagagatacagatagagaagcttcggaactttagcgattgcatcgttatgcacccgcaaattaaaacaatttttaatgactttgatgaattaagattaaaccgtaaatttcagtcagaccaacagtgtatgctattaattggtgatacaggtgttggaaaaagtcataccattaatcactacaaaaaaagagttctagctacacagaattatagtcgaaacactatgccagtcttagtaagtcgtatatctagggggaaaggcttagatgctactttagtccaaatgctggcagatctggagctatttggaagtagtcaaattaaaaagcgaggctacaaaacagaccttactaaaaagctcgtagagagcttaattaaagctcaagtagagctactcatcattaatgagtttcaggagttaatagagtttaaaagcgtacaagaacgacaacaaattgcaaatgggttaaagtttattagtgaagaggccaaagtgccaatagtactggttggtatgccttgggctgcaaaaatagctgaagaacctcaatgggcttctcgcttagttagaaaaagaaaacttgaatactttagcctaaaaaatgacagcaagtactttcgccaatatttgatggggttagctaagaaaatgccatttgatgtacctcctaagctcgaaagtaaaaataccacaatagcgttgtttgctgcatgtcgaggtgagaatcgagcccttaaacatctactgttggaggctttaaaattagcactaagttgtaatgagtatcttgaaaataaacattttattactgcttatgacaagtttgatttttttaatgataaggaaaaactaaaatcaaaaaatccttttaaacaagacattaaagatattgaaatttatgaggtaatcaaaaactcatcttataacccaaatgcattagacccagaagatatgctcacagatcgagtgtttgcaatagtaaagtaacctaggctgctgccaccgctgagcaataactagcataaccccttggggcctctaaacgggtcttgaggggttttttgctgaaacctcaggcatttgagaagcacacggtcacactgcttccggtagtcaataaaccggtaaaccagcaatagacataagcggctatttaacgaccctgccctgaaccgacgaccgggtcatcgtggccggatcttgcggcccctcggcttgaacgaattgttagacattatttgccgactaccttggtgatctcgcctt

SEQ ID NO: 5225 - DNA, 12857 bp, synthetic construct
  source 1..12857: mol_type = other DNA
tcacgtagtggacaaattcttccaactgatctgcgcgcgaggccaagcgatcttcttcttgtccaagataagcctgtctagcttcaagtatgacgggctgatactgggccggcaggcgctccattgcccagtcggcagcgacatccttcggcgcgattttgccggttactgcgctgtaccaaatgcgggacaacgtaagcactacatttcgctcatcgccagcccagtcgggcggcgagttccatagcgttaaggtttcatttagcgcctcaaatagatcctgttcaggaaccggatcaaagagttcctccgccgctggacctaccaaggcaacgctatgttctcttgcttttgtcagcaagatagccagatcaatgtcgatcgtggctggctcgaagatacctgcaagaatgtcattgcgctgccattctccaaattgcagttcgcgcttagctggataacgccacggaatgatgtcgtcgtgcacaacaatggtgacttctacagcgcggagaatctcgctctctccaggggaagccgaagtttccaaaaggtcgttgatcaaagctcgccgcgttgtttcatcaagccttacggtcaccgtaaccagcaaatcaatatcactgtgtggcttcaggccgccatccactgcggagccgtacaaatgtacggccagcaacgtcggttcgagatggcgctcgatgacgccaactacctctgatagttgagtcgatacttcggcgatcaccgcttccctcatactcttcctttttcaatattattgaagcatttatcagggttattgtctcatgagcggatacatatttgaatgtatttagaaaaataaacaaatagctagctcactcggtcgctacgctccgggcgtgagactgcggcgggcgctgcggacacatacaaagttacccacagattccgtggataagcaggggactaacatgtgaggcaaaacagcagggccgcgccggtggcgtttttccataggctccgccctcctgccagagttcacataaacagacgcttttccggtgcatctgtgggagccgtgaggctcaaccatgaatctgacagtacgggcgaaacccgacaggacttaaagatccccaccgtttccggcgggtcgctccctcttgcgctctcctgttccgaccctgccgtttaccggatacctgttccgcctttctcccttacgggaagtgtggcgctttctcatagctcacacactggtatctcggctcggtgtaggtcgttcgctccaagctgggctgtaagcaagaactccccgttcagcccgactgctgcgccttatccggtaactgttcacttgagtccaacccggaaaagcacggtaaaacgccactggcagcagccattggtaactgggagttcgcagaggatttgtttagctaaacacgcggttgctcttgaagtgtgcgccaaagtccggctacactggaaggacagatttggttgctgtgctctgcgaaagccagttaccacggttaagcagttccccaactgacttaaccttcgatcaaaccacctccccaggtggttttttcgtttacagggcaaaagattacgcgcagaaaaaaaggatctcaagaagatcctttgatcttttctactgaaccgctctagatttcagtgcaatttatctcttcaaatgtagcacctgaagtcagccccatacgatataagttgtaattctcatgttagtcatgccccgcgcccaccggaaggagctgactgggttgaaggctctcaagggcatcggtcgagatcccggtgcctaatgagtgagctaacttacattaattgcgttgcgctcactgcccgctttccagtcgggaaacctgtcgtgccagctgcattaatgaatcggccaacgcgcggggagaggcggtttgcgtattgggcgccagggtggtttttcttttcaccagtgagacgggcaacagctgattgcccttcaccgcctggccctgagagagttgcagcaagcggtccacgctggtttgccccagcaggcgaaaatcctgtttgatggtggttaacggcgggatataacatgagctgtcttcggtatcgtcgtatcccactaccgagatgtccgcaccaacgcgcagcccggactcggtaatggcgcgcattgcgcccagcgccatctgatcgttggcaaccagcatcgcagtgggaacgatgccctcattcagcatttgcatggtttgttgaaaaccggacatggcactccagtcgccttcccgttccgctatcggctgaatttgattgcgagtgagatatttatgccagccagccagacgcagacgcgccgagacagaacttaatgggcccgctaacagcgcgatttgctggtgacccaatgcgaccagatgctccacgcccagtcgcgtaccgtcttcatgggagaaaataatactgttgatgggtgtctggtcagagacatcaagaaataacgccggaacattagtgcaggcagcttccacagcaatggcatcctggtcatccagcggatagttaatgatcagcccactgacgcgttgcgcgagaagattgtgcaccgccgctttacaggcttcgacgccgcttcgttctaccatcgacaccaccacgctggcacccagttgatcggcgcgagatttaatcgccgcgacaatttgcgacggcgcgtgcagggccagactggaggtggcaacgccaatcagcaacgactgtttgcccgccagttgttgtgccacgcggttgggaatgtaattcagctccgccatcgccgcttccactttttcccgcgttttcgcagaaacgtggctggcctggttcaccacgcgggaaacggtctgataagagacaccggcatactctgcgacatcgtataacgttactggtttcacattcaccaccctgaattgactctcttccgggcgctatcatgccataccgcgaaaggttttgcgccattcgatggtgtccgggatctcgacgctctcccttatgcgactcctgcattaggaaattaatacgactcactataggggaattgtgagcggataacaattcccctgtagaaataattttgtttaactttaataaggagatataccatgggtgacctgccgtataggcagctgaaaatagtacagcgcggctgaaatcatcattaaagcggtgacctgccgtataggcagctgaaaattagcgaattccgagcgaaggagatatacatatggcttttctattttctcccaaggctcgggcattttctgacgaatcgctggaaagttacttgttacgggtcgtttcagagaatttttttgactcgtatgaagggctcagcttagctattcgcgaagagctgcatgagcttgattttgaggcgcatggtgcattcccagtagatttaaagaggctcaatgtttaccacgccaaacataatagccattttaggatgcgggctttaggactactcgaaacactactagatttacctcgatacgagctacaaaagttggctttgctaaagtcagatattaaatttaactcctccgtcgctttatataacaatggcgtagacattcccctgaggtttattcgtcaccacgccgaggaagctgttgattcgattccggtatgctcacaatgtcttgcagaagaagcctatataaaacaaagttggcatataaagtgggtaaatgcatgcactaaacatcagtgtgctttgctacataactgcccagaatgctacgctccaattaactatatcgagaatgagtcaattactcattgttcatgcggttttgagctgtcttgcgctagtacctcgcctgtaaatacgttaagtattgaacatttaaataaattactggataaaggtgagcgcaacgatagtaacccgctatttaacaatatgactcttacagaacgttttgctgcgcttctttggtatcaggagcggtattctcaaacagataacttttgtttaaatgatgctgtgaactattttagtaaatggccagcagtttttaatacagagcttgatgaactaagtaaaaatgcagaaatgaagttaatagatctgtttaataaaactgagtttaagtttatttttggggatgctattttagcttgccccagtactcaaaagcagagtgaatctcactttatttatagggctctattagattatttagttactttagttgagagtaaccctaaaactaaaaagcccaacgcagccgacttattagtaagtgtattggaggctgcaactttattaggtacttcagtagagcaggtttataggttgtaccaaaatggtattttgcaaacggcatttcgtcataaaatgaaccagcggatcaacccttataagggcgcgttttttttaagacatgttatagagtacaaaaccagttttggaaatgacaaagctagaatgtatttgtcggcatggtgagtatatgcatcttaaggaactgctagagattacagacaccactgagcgggataggtcattacgtcgtgcttttagcccttatacggcaatgattgatataacaggcagcgaagccgttgccctgattattttgttaaacctgacttatcgaaaaaaccaagttgatgacttgctggataaaaagctcgcaaaacaggctttaaaaagtgaagaccatattaataaatgtattaaggaaatagcgtggtttcatactcataatttaaagtaccctgacattagagtcagtaagcaaaatttagccgtagagcctccaacactgcactcttatgttttgagtagtgctaactatcctaaagcctatggctggtcacataactcagctaaagttaattttgctaaattatttgttagttactttaaatggcaaaatcaagtcagttggctggcacaagtattagctacgaactcggataactggaaatccgcatttacctctcttgggttatccgttaaggcatttaaaagtttatgtgtaaccgttaaaaattcattgcctgaagaggccattcccgactctgttgaccgctactctcgccaaattagaatgccttatcatgatggttacttagctgttacgcctgtaattagccatgttgttcaatcaaaaattcaacaggcggcaattgataaacgagcccgatttagcaatgtagagtttacgcgtcctgctgctgtcagtatgttagctgcttccttaggtggtgttattaatgtgcttaattaccctccttatatacgaagtaaatatcatggtttaagtaactcacgagcatttaaattaaataatgggcaaacagtatttaacgttgaggcactattaaagccggaattaattaaagccttagaaggtattatatttagtaataatgcgctggctcttaaacagcgtagacaacaaaaagtaaaaaatattaaagagctgagaaacacgcttttagaatggttttcacctgtatttgaatggcgcttggacgctattgagaatgggtatgacttagaacagcttgagagtgcttcagagcgactagagtataaaatactatcgctacccgacaatgaactcccttcgctaacgattcctttatttaggttactaaatgaaatgcttggcggtgtgagcatgacacaaaggtatgcttttcatcctaaattaatgagccctttaaaagcagctttacaatggttgcttgttaatcttacagatcaaaaacatgtactgattgaagaagatgatgaacattatcgctatcttcatttaagcggtatacgtgtgtttgatgcgcaagcattatcaaacccttactgctcaggtattccatctttaaccgctgtttggggtatgattcacagctaccaaagaaaacttaatgaggcgctaggaacaaatgtacggttcacatccttttcttggtttattaggaattattctgctgtagcaggaaaaaaacttcctgaactgagccttcaaggcgctcagcaaagtaggctcaagcggccaggaattatcgatggcaaatactgtgatttggtatttgatttaataatacacattgatggttatgaagatgacttacaggcagtagatagtaagcctgacattttgaaagcgcattttccatctaactttgcaggtggtgttatgcatcagcctgagcttaactcaaatataaattggtgctgtttatatagtaatgaaaatcagttatttgaaaagttaaggcgactccctttatctggttgttgggttatgccaactgagcacaaaatacaggatttagatgagctactcttattattaaatagtgactctaaactaagcccatctatgatgggatatatgttactcaccgaaccgatggctagagttggatcacttgaaagactgcattgttatgctgaaccagcaataggagtggtgaaatacgaagcggccactagtgtaaggctaaaaggtattggtaactattttaatagcgctttttggatgctagatgcacaagaaaagtttatgctaatgaaaaaagtttaaccggaaaatacttaatggagctctgtaatatattaaaatatgatcgctcgctttaccctggtaaagctgtgtttttttataaaacggctgactctgattttgttccactagaggctgatattaataaaattcgaggccctaaatctggttttactgaagcattcaccccacagttttccccaaaaaacatctcacctcaggacttaacacataataatatattaactctcgaagagtgttatgtacctccaaatgtggagcatatattttgtcggttttctttgagagtacaggctaactcgttggtcccttcaggctgtagtgatccagaggttttttctttattaaaagagttggcagaaacatttaaagaatgcggtggttataaagaactagcagtaagatattgtcgaaatattttgataggtacatggctttggcgtaatcaaaacaccggcaacactcaaattgaaattaaaaccagcaaagggagttgttatttaatcgataacactcgtaagttagcttgggaaagcaaatgggcttctgatgatctaaaagtattggaagagcttagtaatgaaattgagagcgcattaactgatcccaatgtgttttggagtgctgatataaccgcgaaaatagaagcctcattttgccaagagatttacccaagccaaatccttaacgacaaggttaagcaaggagaggcctcaaaacagtttgtaaaagctaagtgtgcagatggccgttacgctgtaagttttaattcagtaaaaataggagcagcccttcagtcaatagatgattggtgggatgaggatgcaagtaaaagattacgagtgcatgagtttggtgctgataaagaaataggggttgcccgacgtcctcctgattctgaacagaatttttattctattttcaaaaatacggaatggtatttgtcagcccttaaaaattgcattactaataaaaatgaaaaaatagacccagctatttattacttattctctgtattgattaagggcggaatgttccagaaaaaagcagaggctaaaaaggcgtaattatgcaaaggtattacttcacagtccactttttaccaaaacaagctaatctagcgctgcttactggccgttgtatttctattatgcatgggtttattttgaagcataatattgaaggaatgggggttacgtttcctgcatggtcggactcatcaattggtaatgaaattgcttttgtttacacggacaaggagattttaaatacccttaaagatcaggcatattttgtggacatgcaagattgtggcttttttaaagtaagccaagttttagctgtacctgacagctgcgaagaagtacgttttatacgtaatcaggcggtagcaaaaattttcacaggtgaaagtagaagaagattaaagcgcctgcaaaaaagagcgttagcaagaggtgaagattttaatcctaaaaagatcgaagctccccgagagattgatattttccatagagtggctatgactagtaagagttcacaagaggattatattctgcatattcaaaagcaagatgttgactgccaagctgagccatactttagtaattatgggcttgcctcaaatgaaaagtttaaaggcacggttccggatttatcaccctcaatagatagaaattaacctttaataaggagatatagcatgtatatacgcaacttgagaaagccatctccaaataaaaatgtatttaaatttgcgagcactaaagttagtagtgtagttatgtgtgagagttcattagagtttgatgcatgttttcatcatgaatataacgatttgatagagagttttgggagtcagcctgaaggctttaaatatgagtttatgggtaaaagtttaccttacacaccagatgcactgatttcatatacagataaaacccaaaaataccacgaatataagccctattctaaaattgcttctccactatttagagctgaatttgctgccaaaagagctgcatcattaaaattggggattgatcttgttttagtaactgataggcaaattagggtaaatccaatattaaacaacttaaagttattacaccgctactcaggtgtttatggtatcagcggcattcaaaaagagttgctcagttttattcataaatcaggggtaatcaagctaaatgatataagctctcaggttgggataccaattggtgaaacacgatcttttttatttgggctcatgcataaagggttggttaaggctgatctagggtgtgatgatttaactaataatccaacattatgggctacaccaggcagcggctccggaaaacggacagccgacggaagcgagttcgagtcaccaaagaagaagcggaaagtcggatcctctggcagcgaaaccccgggtacgagcgagagcgcaaccccggaatcgtccggcggtagcagcggtggtagctcgaccatgggaacaaaatcagaactaatagagaggttggctacccagcaaagccacatcccggcaaagacggtggaagatgccgtcaaggagatgctggagcacatggcgtccaccctggcgcaaggtgggtctggcggtttgaccaaagcggaaatgagcgaatatctgttcgacaagctcggcctgtcgaaacgtgacgcgaaagagttagttgagttgttcttcgaggaaatccgcagagcgctggagaacggcgaacaggttaaactgtccggtttcggcaattttgatctgcgcgacaagaaccagcgtccgggtcgcaacccgaaaaccggtgaggacatcccgattaccgcacgtcgtgtggttacctttcgcccaggtcagaaactgaaaagccgtgtggaaaatgcgggtggcggcgaacgtattgagatccgtggtttcggctcttttagcctgcattatcgtgctccgcgtaccggccgtaacccgaaaaccggtgataaggtggagttggaaggtaagtacgttccgcattttaaaccgggtaaagaactgcgtgatcgtgccaatatttacggctccggtagcgaaacgccggggacttctgaatctgctactccggaaagcggaggctctggctcgtcaggaggttcaggaagttcaggcggtatgactgacttttttaatgaatttgatgaaagcctggtaccattaaagccacaaacgcccacacaatacgtcaaattagatgatgccaacttaatccagcgtgatttggataccttttcagatacctttaaaaaccaagcactacaaaggtataagctaattagcactatagataaaaaactttcacgcggctggacccaacgaaatttagatcctattttagatgagctttttaaaggaggtgacgtagttcggccaaattggcgaactgttgctcgttggcgcaaaaaatatatcgaaagcaacggtgatatagcctcccttgctgataaaaaccacaaaatgggaaacagaactaaccgtataaaaggggatgataaattttttgataaagcattagaacgatttttagatgctaaaagacctactatagcaactgcatatcagtactataaagaccttattgttattgaaaatgagagtattgtcgaaggcaagattccaataatatcctacaatgcgtttaataaaagaatcaaagcaatacccccatacgcggtcgcggtcgcaaggcatggtaaatttaaagcagaccaatggtttgcttactgcgctgcgcacgtacccccgacaagaatattagagcgtgtagagattgatcatacaccacttgatttaatcctacttgatgatgagttacttattcccataggaagaccttacctaacattacttattgatgtatttagtggctgtgttcttggttttcatcttagttataaatccccttcctacgtatctgctgctaaggctattactcatgcgattaaaccaaagtctcttgatgctctgaatatagaactacaaaatgattggccttgctttggtaaatttgaaaatttagttgtagataatggtgctgagttttggtctaaaaacttagagcatgcttgtcagtcagcaggaataaatatccaatataaccctgtgcgcaagccttggctaaaaccctttatagagcgtttttttggggtgatgaatgaatatttcttacctgaattaccaggaaagacattttcaaatattttagaaaaagaagagtataaacctgagaaagatgcaattatgcgcttctcaacttttgttgaagaatttcaccgctggatcgcggatgtgtatcatcaagacagtaattcacgtgaaactcgaatcccaattaaacgttggcaacaagggtttgatgcatatcccccattgaccatgaatgaagaggaggaaacgcgtttttcaatgttaatgcgcatctcagactcaagaacgttaacgagaaatgggtttaaatatcaagagttaatgtatgactcaacagctttggctgattatcgtaaacattatccgcaaacaaaagaaactgtaaaaaaactgattaaagtagaccctgatgacatctcaaaaatttatgtttatttagaagagttagaaagttatctcgaagtaccgtgtacagatcctaccggctatacggatggtttaagtatctatgagcataaaacaataaaaaaaattaacagggaagtcatacgggaatctaaagatagtttgggcttagcgaaagcacgcatggctattcatgagcgagtaaagcaagagcaagaagttttcattgaatcaaaaactaaagctaagataacagctgttaaaaagcaagctcaaatagctgatgtaagtaatacaggaacgagcactattaaggtttctgaagaaagtgcagcccctgtgcaaaaacatataagtaacgataattctgacgactgggatgatgacttagaggcatttgaatgaatgccttaacagagatacagatagagaagcttcggaactttagcgattgcatcgttatgcacccgcaaattaaaacaatttttaatgactttgatgaattaagattaaaccgtaaatttcagtcagaccaacagtgtatgctattaattggtgatacaggtgttggaaaaagtcataccattaatcactacaaaaaaagagttctagctacacagaattatagtcgaaacactatgccagtcttagtaagtcgtatatctagggggaaaggcttagatgctactttagtccaaatgctggcagatctggagctatttggaagtagtcaaattaaaaagcgaggctacaaaacagaccttactaaaaagctcgtagagagcttaattaaagctcaagtagagctactcatcattaatgagtttcaggagttaatagagtttaaaagcgtacaagaacgacaacaaattgcaaatgggttaaagtttattagtgaagaggccaaagtgccaatagtactggttggtatgccttgggctgcaaaaatagctgaagaacctcaatgggcttctcgcttagttagaaaaagaaaacttgaatactttagcctaaaaaatgacagcaagtactttcgccaatatttgatggggttagctaagaaaatgccatttgatgtacctcctaagctcgaaagtaaaaataccacaatagcgttgtttgctgcatgtcgaggtgagaatcgagcccttaaacatctactgttggaggctttaaaattagcactaagttgtaatgagtatcttgaaaataaacattttattactgcttatgacaagtttgatttttttaatgataaggaaaaactaaaatcaaaaaatccttttaaacaagacattaaagatattgaaatttatgaggtaatcaaaaactcatcttataacccaaatgcattagacccagaagatatgctcacagatcgagtgtttgcaatagtaaagtaacctaggctgctgccaccgctgagcaataactagcataaccccttggggcctctaaacgggtcttgaggggttttttgctgaaacctcaggcatttgagaagcacacggtcacactgcttccggtagtcaataaaccggtaaaccagcaatagacataagcggctatttaacgaccctgccctgaaccgacgaccgggtcatcgtggccggatcttgcggcccctcggcttgaacgaattgttagacattatttgccgactaccttggtgatctcgcctt

SEQ ID NO: 5226 - DNA, 12941 bp, synthetic construct
  source 1..12941: mol_type = other DNA
tatcactgtgtggcttcaggccgccatccactgcggagccgtacaaatgtacggccagcaacgtcggttcgagatggcgctcgatgacgccaactacctctgatagttgagtcgatacttcggcgatcaccgcttccctcatactcttcctttttcaatattattgaagcatttatcagggttattgtctcatgagcggatacatatttgaatgtatttagaaaaataaacaaatagctagctcactcggtcgctacgctccgggcgtgagactgcggcgggcgctgcggacacatacaaagttacccacagattccgtggataagcaggggactaacatgtgaggcaaaacagcagggccgcgccggtggcgtttttccataggctccgccctcctgccagagttcacataaacagacgcttttccggtgcatctgtgggagccgtgaggctcaaccatgaatctgacagtacgggcgaaacccgacaggacttaaagatccccaccgtttccggcgggtcgctccctcttgcgctctcctgttccgaccctgccgtttaccggatacctgttccgcctttctcccttacgggaagtgtggcgctttctcatagctcacacactggtatctcggctcggtgtaggtcgttcgctccaagctgggctgtaagcaagaactccccgttcagcccgactgctgcgccttatccggtaactgttcacttgagtccaacccggaaaagcacggtaaaacgccactggcagcagccattggtaactgggagttcgcagaggatttgtttagctaaacacgcggttgctcttgaagtgtgcgccaaagtccggctacactggaaggacagatttggttgctgtgctctgcgaaagccagttaccacggttaagcagttccccaactgacttaaccttcgatcaaaccacctccccaggtggttttttcgtttacagggcaaaagattacgcgcagaaaaaaaggatctcaagaagatcctttgatcttttctactgaaccgctctagatttcagtgcaatttatctcttcaaatgtagcacctgaagtcagccccatacgatataagttgtaattctcatgttagtcatgccccgcgcccaccggaaggagctgactgggttgaaggctctcaagggcatcggtcgagatcccggtgcctaatgagtgagctaacttacattaattgcgttgcgctcactgcccgctttccagtcgggaaacctgtcgtgccagctgcattaatgaatcggccaacgcgcggggagaggcggtttgcgtattgggcgccagggtggtttttcttttcaccagtgagacgggcaacagctgattgcccttcaccgcctggccctgagagagttgcagcaagcggtccacgctggtttgccccagcaggcgaaaatcctgtttgatggtggttaacggcgggatataacatgagctgtcttcggtatcgtcgtatcccactaccgagatgtccgcaccaacgcgcagcccggactcggtaatggcgcgcattgcgcccagcgccatctgatcgttggcaaccagcatcgcagtgggaacgatgccctcattcagcatttgcatggtttgttgaaaaccggacatggcactccagtcgccttcccgttccgctatcggctgaatttgattgcgagtgagatatttatgccagccagccagacgcagacgcgccgagacagaacttaatgggcccgctaacagcgcgatttgctggtgacccaatgcgaccagatgctccacgcccagtcgcgtaccgtcttcatgggagaaaataatactgttgatgggtgtctggtcagagacatcaagaaataacgccggaacattagtgcaggcagcttccacagcaatggcatcctggtcatccagcggatagttaatgatcagcccactgacgcgttgcgcgagaagattgtgcaccgccgctttacaggcttcgacgccgcttcgttctaccatcgacaccaccacgctggcacccagttgatcggcgcgagatttaatcgccgcgacaatttgcgacggcgcgtgcagggccagactggaggtggcaacgccaatcagcaacgactgtttgcccgccagttgttgtgccacgcggttgggaatgtaattcagctccgccatcgccgcttccactttttcccgcgttttcgcagaaacgtggctggcctggttcaccacgcgggaaacggtctgataagagacaccggcatactctgcgacatcgtataacgttactggtttcacattcaccaccctgaattgactctcttccgggcgctatcatgccataccgcgaaaggttttgcgccattcgatggtgtccgggatctcgacgctctcccttatgcgactcctgcattaggaaattaatacgactcactataggggaattgtgagcggataacaattcccctgtagaaataattttgtttaactttaataaggagatataccatgggtgacctgccgtataggcagctgaaaatagtacagcgcggctgaaatcatcattaaagcggtgacctgccgtataggcagctgaaaattagcgaattccgagcgaaggagatatacatatggcttttctattttctcccaaggctcgggcattttctgacgaatcgctggaaagttacttgttacgggtcgtttcagagaatttttttgactcgtatgaagggctcagcttagctattcgcgaagagctgcatgagcttgattttgaggcgcatggtgcattcccagtagatttaaagaggctcaatgtttaccacgccaaacataatagccattttaggatgcgggctttaggactactcgaaacactactagatttacctcgatacgagctacaaaagttggctttgctaaagtcagatattaaatttaactcctccgtcgctttatataacaatggcgtagacattcccctgaggtttattcgtcaccacgccgaggaagctgttgattcgattccggtatgctcacaatgtcttgcagaagaagcctatataaaacaaagttggcatataaagtgggtaaatgcatgcactaaacatcagtgtgctttgctacataactgcccagaatgctacgctccaattaactatatcgagaatgagtcaattactcattgttcatgcggttttgagctgtcttgcgctagtacctcgcctgtaaatacgttaagtattgaacatttaaataaattactggataaaggtgagcgcaacgatagtaacccgctatttaacaatatgactcttacagaacgttttgctgcgcttctttggtatcaggagcggtattctcaaacagataacttttgtttaaatgatgctgtgaactattttagtaaatggccagcagtttttaatacagagcttgatgaactaagtaaaaatgcagaaatgaagttaatagatctgtttaataaaactgagtttaagtttatttttggggatgctattttagcttgccccagtactcaaaagcagagtgaatctcactttatttatagggctctattagattatttagttactttagttgagagtaaccctaaaactaaaaagcccaacgcagccgacttattagtaagtgtattggaggctgcaactttattaggtacttcagtagagcaggtttataggttgtaccaaaatggtattttgcaaacggcatttcgtcataaaatgaaccagcggatcaacccttataagggcgcgttttttttaagacatgttatagagtacaaaaccagttttggaaatgacaaagctagaatgtatttgtcggcatggtgagtatatgcatcttaaggaactgctagagattacagacaccactgagcgggataggtcattacgtcgtgcttttagcccttatacggcaatgattgatataacaggcagcgaagccgttgccctgattattttgttaaacctgacttatcgaaaaaaccaagttgatgacttgctggataaaaagctcgcaaaacaggctttaaaaagtgaagaccatattaataaatgtattaaggaaatagcgtggtttcatactcataatttaaagtaccctgacattagagtcagtaagcaaaatttagccgtagagcctccaacactgcactcttatgttttgagtagtgctaactatcctaaagcctatggctggtcacataactcagctaaagttaattttgctaaattatttgttagttactttaaatggcaaaatcaagtcagttggctggcacaagtattagctacgaactcggataactggaaatccgcatttacctctcttgggttatccgttaaggcatttaaaagtttatgtgtaaccgttaaaaattcattgcctgaagaggccattcccgactctgttgaccgctactctcgccaaattagaatgccttatcatgatggttacttagctgttacgcctgtaattagccatgttgttcaatcaaaaattcaacaggcggcaattgataaacgagcccgatttagcaatgtagagtttacgcgtcctgctgctgtcagtatgttagctgcttccttaggtggtgttattaatgtgcttaattaccctccttatatacgaagtaaatatcatggtttaagtaactcacgagcatttaaattaaataatgggcaaacagtatttaacgttgaggcactattaaagccggaattaattaaagccttagaaggtattatatttagtaataatgcgctggctcttaaacagcgtagacaacaaaaagtaaaaaatattaaagagctgagaaacacgcttttagaatggttttcacctgtatttgaatggcgcttggacgctattgagaatgggtatgacttagaacagcttgagagtgcttcagagcgactagagtataaaatactatcgctacccgacaatgaactcccttcgctaacgattcctttatttaggttactaaatgaaatgcttggcggtgtgagcatgacacaaaggtatgcttttcatcctaaattaatgagccctttaaaagcagctttacaatggttgcttgttaatcttacagatcaaaaacatgtactgattgaagaagatgatgaacattatcgctatcttcatttaagcggtatacgtgtgtttgatgcgcaagcattatcaaacccttactgctcaggtattccatctttaaccgctgtttggggtatgattcacagctaccaaagaaaacttaatgaggcgctaggaacaaatgtacggttcacatccttttcttggtttattaggaattattctgctgtagcaggaaaaaaacttcctgaactgagccttcaaggcgctcagcaaagtaggctcaagcggccaggaattatcgatggcaaatactgtgatttggtatttgatttaataatacacattgatggttatgaagatgacttacaggcagtagatagtaagcctgacattttgaaagcgcattttccatctaactttgcaggtggtgttatgcatcagcctgagcttaactcaaatataaattggtgctgtttatatagtaatgaaaatcagttatttgaaaagttaaggcgactccctttatctggttgttgggttatgccaactgagcacaaaatacaggatttagatgagctactcttattattaaatagtgactctaaactaagcccatctatgatgggatatatgttactcaccgaaccgatggctagagttggatcacttgaaagactgcattgttatgctgaaccagcaataggagtggtgaaatacgaagcggccactagtgtaaggctaaaaggtattggtaactattttaatagcgctttttggatgctagatgcacaagaaaagtttatgctaatgaaaaaagtttaaccggaaaatacttaatggagctctgtaatatattaaaatatgatcgctcgctttaccctggtaaagctgtgtttttttataaaacggctgactctgattttgttccactagaggctgatattaataaaattcgaggccctaaatctggttttactgaagcattcaccccacagttttccccaaaaaacatctcacctcaggacttaacacataataatatattaactctcgaagagtgttatgtacctccaaatgtggagcatatattttgtcggttttctttgagagtacaggctaactcgttggtcccttcaggctgtagtgatccagaggttttttctttattaaaagagttggcagaaacatttaaagaatgcggtggttataaagaactagcagtaagatattgtcgaaatattttgataggtacatggctttggcgtaatcaaaacaccggcaacactcaaattgaaattaaaaccagcaaagggagttgttatttaatcgataacactcgtaagttagcttgggaaagcaaatgggcttctgatgatctaaaagtattggaagagcttagtaatgaaattgagagcgcattaactgatcccaatgtgttttggagtgctgatataaccgcgaaaatagaagcctcattttgccaagagatttacccaagccaaatccttaacgacaaggttaagcaaggagaggcctcaaaacagtttgtaaaagctaagtgtgcagatggccgttacgctgtaagttttaattcagtaaaaataggagcagcccttcagtcaatagatgattggtgggatgaggatgcaagtaaaagattacgagtgcatgagtttggtgctgataaagaaataggggttgcccgacgtcctcctgattctgaacagaatttttattctattttcaaaaatacggaatggtatttgtcagcccttaaaaattgcattactaataaaaatgaaaaaatagacccagctatttattacttattctctgtattgattaagggcggaatgttccagaaaaaagcagaggctaaaaaggcgtaattatgcaaaggtattacttcacagtccactttttaccaaaacaagctaatctagcgctgcttactggccgttgtatttctattatgcatgggtttattttgaagcataatattgaaggaatgggggttacgtttcctgcatggtcggactcatcaattggtaatgaaattgcttttgtttacacggacaaggagattttaaatacccttaaagatcaggcatattttgtggacatgcaagattgtggcttttttaaagtaagccaagttttagctgtacctgacagctgcgaagaagtacgttttatacgtaatcaggcggtagcaaaaattttcacaggtgaaagtagaagaagattaaagcgcctgcaaaaaagagcgttagcaagaggtgaagattttaatcctaaaaagatcgaagctccccgagagattgatattttccatagagtggctatgactagtaagagttcacaagaggattatattctgcatattcaaaagcaagatgttgactgccaagctgagccatactttagtaattatgggcttgcctcaaatgaaaagtttaaaggcacggttccggatttatcaccctcaatagatagaaattaacctttaataaggagatatagcatgtatatacgcaacttgagaaagccatctccaaataaaaatgtatttaaatttgcgagcactaaagttagtagtgtagttatgtgtgagagttcattagagtttgatgcatgttttcatcatgaatataacgatttgatagagagttttgggagtcagcctgaaggctttaaatatgagtttatgggtaaaagtttaccttacacaccagatgcactgatttcatatacagataaaacccaaaaataccacgaatataagccctattctaaaattgcttctccactatttagagctgaatttgctgccaaaagagctgcatcattaaaattggggattgatcttgttttagtaactgataggcaaattagggtaaatccaatattaaacaacttaaagttattacaccgctactcaggtgtttatggtatcagcggcattcaaaaagagttgctcagttttattcataaatcaggggtaatcaagctaaatgatataagctctcaggttgggataccaattggtgaaacacgatcttttttatttgggctcatgcataaagggttggttaaggctgatctagggtgtgatgatttaactaataatccaacattatgggctacaccaggcagcggctccggaaaacggacagccgacggaagcgagttcgagtcaccaaagaagaagcggaaagtcggatccgggggaagtggaggttcaggaggctctgggggctccggcggtagcggtggtagcatgggaacaaaatcagaactaatagagaggttggctacccagcaaagccacatcccggcaaagacggtggaagatgccgtcaaggagatgctggagcacatggcgtccaccctggcgcaaggtgggtctggcggtttgaccaaagcggaaatgagcgaatatctgttcgacaagctcggcctgtcgaaacgtgacgcgaaagagttagttgagttgttcttcgaggaaatccgcagagcgctggagaacggcgaacaggttaaactgtccggtttcggcaattttgatctgcgcgacaagaaccagcgtccgggtcgcaacccgaaaaccggtgaggacatcccgattaccgcacgtcgtgtggttacctttcgcccaggtcagaaactgaaaagccgtgtggaaaatgcgggtggcggcgaacgtattgagatccgtggtttcggctcttttagcctgcattatcgtgctccgcgtaccggccgtaacccgaaaaccggtgataaggtggagttggaaggtaagtacgttccgcattttaaaccgggtaaagaactgcgtgatcgtgccaatatttacggctctggaggttcatccggcggaagtagcgggtccgaaaccccaggcaccagcgagtccgcgaccccggagtccagcggttctgaaacgccgggtacttcagagtctgctaccccggaatcttctggcagcgaaaccccgggtacgagcgagagcgcaaccccggaatcgtccggcggtagcagcggtggtagctcgaccatgactgacttttttaatgaatttgatgaaagcctggtaccattaaagccacaaacgcccacacaatacgtcaaattagatgatgccaacttaatccagcgtgatttggataccttttcagatacctttaaaaaccaagcactacaaaggtataagctaattagcactatagataaaaaactttcacgcggctggacccaacgaaatttagatcctattttagatgagctttttaaaggaggtgacgtagttcggccaaattggcgaactgttgctcgttggcgcaaaaaatatatcgaaagcaacggtgatatagcctcccttgctgataaaaaccacaaaatgggaaacagaactaaccgtataaaaggggatgataaattttttgataaagcattagaacgatttttagatgctaaaagacctactatagcaactgcatatcagtactataaagaccttattgttattgaaaatgagagtattgtcgaaggcaagattccaataatatcctacaatgcgtttaataaaagaatcaaagcaatacccccatacgcggtcgcggtcgcaaggcatggtaaatttaaagcagaccaatggtttgcttactgcgctgcgcacgtacccccgacaagaatattagagcgtgtagagattgatcatacaccacttgatttaatcctacttgatgatgagttacttattcccataggaagaccttacctaacattacttattgatgtatttagtggctgtgttcttggttttcatcttagttataaatccccttcctacgtatctgctgctaaggctattactcatgcgattaaaccaaagtctcttgatgctctgaatatagaactacaaaatgattggccttgctttggtaaatttgaaaatttagttgtagataatggtgctgagttttggtctaaaaacttagagcatgcttgtcagtcagcaggaataaatatccaatataaccctgtgcgcaagccttggctaaaaccctttatagagcgtttttttggggtgatgaatgaatatttcttacctgaattaccaggaaagacattttcaaatattttagaaaaagaagagtataaacctgagaaagatgcaattatgcgcttctcaacttttgttgaagaatttcaccgctggatcgcggatgtgtatcatcaagacagtaattcacgtgaaactcgaatcccaattaaacgttggcaacaagggtttgatgcatatcccccattgaccatgaatgaagaggaggaaacgcgtttttcaatgttaatgcgcatctcagactcaagaacgttaacgagaaatgggtttaaatatcaagagttaatgtatgactcaacagctttggctgattatcgtaaacattatccgcaaacaaaagaaactgtaaaaaaactgattaaagtagaccctgatgacatctcaaaaatttatgtttatttagaagagttagaaagttatctcgaagtaccgtgtacagatcctaccggctatacggatggtttaagtatctatgagcataaaacaataaaaaaaattaacagggaagtcatacgggaatctaaagatagtttgggcttagcgaaagcacgcatggctattcatgagcgagtaaagcaagagcaagaagttttcattgaatcaaaaactaaagctaagataacagctgttaaaaagcaagctcaaatagctgatgtaagtaatacaggaacgagcactattaaggtttctgaagaaagtgcagcccctgtgcaaaaacatataagtaacgataattctgacgactgggatgatgacttagaggcatttgaatgaatgccttaacagagatacagatagagaagcttcggaactttagcgattgcatcgttatgcacccgcaaattaaaacaatttttaatgactttgatgaattaagattaaaccgtaaatttcagtcagaccaacagtgtatgctattaattggtgatacaggtgttggaaaaagtcataccattaatcactacaaaaaaagagttctagctacacagaattatagtcgaaacactatgccagtcttagtaagtcgtatatctagggggaaaggcttagatgctactttagtccaaatgctggcagatctggagctatttggaagtagtcaaattaaaaagcgaggctacaaaacagaccttactaaaaagctcgtagagagcttaattaaagctcaagtagagctactcatcattaatgagtttcaggagttaatagagtttaaaagcgtacaagaacgacaacaaattgcaaatgggttaaagtttattagtgaagaggccaaagtgccaatagtactggttggtatgccttgggctgcaaaaatagctgaagaacctcaatgggcttctcgcttagttagaaaaagaaaacttgaatactttagcctaaaaaatgacagcaagtactttcgccaatatttgatggggttagctaagaaaatgccatttgatgtacctcctaagctcgaaagtaaaaataccacaatagcgttgtttgctgcatgtcgaggtgagaatcgagcccttaaacatctactgttggaggctttaaaattagcactaagttgtaatgagtatcttgaaaataaacattttattactgcttatgacaagtttgatttttttaatgataaggaaaaactaaaatcaaaaaatccttttaaacaagacattaaagatattgaaatttatgaggtaatcaaaaactcatcttataacccaaatgcattagacccagaagatatgctcacagatcgagtgtttgcaatagtaaagtaacctaggctgctgccaccgctgagcaataactagcataaccccttggggcctctaaacgggtcttgaggggttttttgctgaaacctcaggcatttgagaagcacacggtcacactgcttccggtagtcaataaaccggtaaaccagcaatagacataagcggctatttaacgaccctgccctgaaccgacgaccgggtcatcgtggccggatcttgcggcccctcggcttgaacgaattgttagacattatttgccgactaccttggtgatctcgcctttcacgtagtggacaaattcttccaactgatctgcgcgcgaggccaagcgatcttcttcttgtccaagataagcctgtctagcttcaagtatgacgggctgatactgggccggcaggcgctccattgcccagtcggcagcgacatccttcggcgcgattttgccggttactgcgctgtaccaaatgcgggacaacgtaagcactacatttcgctcatcgccagcccagtcgggcggcgagttccatagcgttaaggtttcatttagcgcctcaaatagatcctgttcaggaaccggatcaaagagttcctccgccgctggacctaccaaggcaacgctatgttctcttgcttttgtcagcaagatagccagatcaatgtcgatcgtggctggctcgaagatacctgcaagaatgtcattgcgctgccattctccaaattgcagttcgcgcttagctggataacgccacggaatgatgtcgtcgtgcacaacaatggtgacttctacagcgcggagaatctcgctctctccaggggaagccgaagtttccaaaaggtcgttgatcaaagctcgccgcgttgtttcatcaagccttacggtcaccgtaaccagcaaatcaa

SEQ ID NO: 5227 - DNA, 12941 bp, synthetic construct
  source 1..12941: mol_type = other DNA
tcacgtagtggacaaattcttccaactgatctgcgcgcgaggccaagcgatcttcttcttgtccaagataagcctgtctagcttcaagtatgacgggctgatactgggccggcaggcgctccattgcccagtcggcagcgacatccttcggcgcgattttgccggttactgcgctgtaccaaatgcgggacaacgtaagcactacatttcgctcatcgccagcccagtcgggcggcgagttccatagcgttaaggtttcatttagcgcctcaaatagatcctgttcaggaaccggatcaaagagttcctccgccgctggacctaccaaggcaacgctatgttctcttgcttttgtcagcaagatagccagatcaatgtcgatcgtggctggctcgaagatacctgcaagaatgtcattgcgctgccattctccaaattgcagttcgcgcttagctggataacgccacggaatgatgtcgtcgtgcacaacaatggtgacttctacagcgcggagaatctcgctctctccaggggaagccgaagtttccaaaaggtcgttgatcaaagctcgccgcgttgtttcatcaagccttacggtcaccgtaaccagcaaatcaatatcactgtgtggcttcaggccgccatccactgcggagccgtacaaatgtacggccagcaacgtcggttcgagatggcgctcgatgacgccaactacctctgatagttgagtcgatacttcggcgatcaccgcttccctcatactcttcctttttcaatattattgaagcatttatcagggttattgtctcatgagcggatacatatttgaatgtatttagaaaaataaacaaatagctagctcactcggtcgctacgctccgggcgtgagactgcggcgggcgctgcggacacatacaaagttacccacagattccgtggataagcaggggactaacatgtgaggcaaaacagcagggccgcgccggtggcgtttttccataggctccgccctcctgccagagttcacataaacagacgcttttccggtgcatctgtgggagccgtgaggctcaaccatgaatctgacagtacgggcgaaacccgacaggacttaaagatccccaccgtttccggcgggtcgctccctcttgcgctctcctgttccgaccctgccgtttaccggatacctgttccgcctttctcccttacgggaagtgtggcgctttctcatagctcacacactggtatctcggctcggtgtaggtcgttcgctccaagctgggctgtaagcaagaactccccgttcagcccgactgctgcgccttatccggtaactgttcacttgagtccaacccggaaaagcacggtaaaacgccactggcagcagccattggtaactgggagttcgcagaggatttgtttagctaaacacgcggttgctcttgaagtgtgcgccaaagtccggctacactggaaggacagatttggttgctgtgctctgcgaaagccagttaccacggttaagcagttccccaactgacttaaccttcgatcaaaccacctccccaggtggttttttcgtttacagggcaaaagattacgcgcagaaaaaaaggatctcaagaagatcctttgatcttttctactgaaccgctctagatttcagtgcaatttatctcttcaaatgtagcacctgaagtcagccccatacgatataagttgtaattctcatgttagtcatgccccgcgcccaccggaaggagctgactgggttgaaggctctcaagggcatcggtcgagatcccggtgcctaatgagtgagctaacttacattaattgcgttgcgctcactgcccgctttccagtcgggaaacctgtcgtgccagctgcattaatgaatcggccaacgcgcggggagaggcggtttgcgtattgggcgccagggtggtttttcttttcaccagtgagacgggcaacagctgattgcccttcaccgcctggccctgagagagttgcagcaagcggtccacgctggtttgccccagcaggcgaaaatcctgtttgatggtggttaacggcgggatataacatgagctgtcttcggtatcgtcgtatcccactaccgagatgtccgcaccaacgcgcagcccggactcggtaatggcgcgcattgcgcccagcgccatctgatcgttggcaaccagcatcgcagtgggaacgatgccctcattcagcatttgcatggtttgttgaaaaccggacatggcactccagtcgccttcccgttccgctatcggctgaatttgattgcgagtgagatatttatgccagccagccagacgcagacgcgccgagacagaacttaatgggcccgctaacagcgcgatttgctggtgacccaatgcgaccagatgctccacgcccagtcgcgtaccgtcttcatgggagaaaataatactgttgatgggtgtctggtcagagacatcaagaaataacgccggaacattagtgcaggcagcttccacagcaatggcatcctggtcatccagcggatagttaatgatcagcccactgacgcgttgcgcgagaagattgtgcaccgccgctttacaggcttcgacgccgcttcgttctaccatcgacaccaccacgctggcacccagttgatcggcgcgagatttaatcgccgcgacaatttgcgacggcgcgtgcagggccagactggaggtggcaacgccaatcagcaacgactgtttgcccgccagttgttgtgccacgcggttgggaatgtaattcagctccgccatcgccgcttccactttttcccgcgttttcgcagaaacgtggctggcctggttcaccacgcgggaaacggtctgataagagacaccggcatactctgcgacatcgtataacgttactggtttcacattcaccaccctgaattgactctcttccgggcgctatcatgccataccgcgaaaggttttgcgccattcgatggtgtccgggatctcgacgctctcccttatgcgactcctgcattaggaaattaatacgactcactataggggaattgtgagcggataacaattcccctgtagaaataattttgtttaactttaataaggagatataccatgggtgacctgccgtataggcagctgaaaatagtacagcgcggctgaaatcatcattaaagcggtgacctgccgtataggcagctgaaaattagcgaattccgagcgaaggagatatacatatggcttttctattttctcccaaggctcgggcattttctgacgaatcgctggaaagttacttgttacgggtcgtttcagagaatttttttgactcgtatgaagggctcagcttagctattcgcgaagagctgcatgagcttgattttgaggcgcatggtgcattcccagtagatttaaagaggctcaatgtttaccacgccaaacataatagccattttaggatgcgggctttaggactactcgaaacactactagatttacctcgatacgagctacaaaagttggctttgctaaagtcagatattaaatttaactcctccgtcgctttatataacaatggcgtagacattcccctgaggtttattcgtcaccacgccgaggaagctgttgattcgattccggtatgctcacaatgtcttgcagaagaagcctatataaaacaaagttggcatataaagtgggtaaatgcatgcactaaacatcagtgtgctttgctacataactgcccagaatgctacgctccaattaactatatcgagaatgagtcaattactcattgttcatgcggttttgagctgtcttgcgctagtacctcgcctgtaaatacgttaagtattgaacatttaaataaattactggataaaggtgagcgcaacgatagtaacccgctatttaacaatatgactcttacagaacgttttgctgcgcttctttggtatcaggagcggtattctcaaacagataacttttgtttaaatgatgctgtgaactattttagtaaatggccagcagtttttaatacagagcttgatgaactaagtaaaaatgcagaaatgaagttaatagatctgtttaataaaactgagtttaagtttatttttggggatgctattttagcttgccccagtactcaaaagcagagtgaatctcactttatttatagggctctattagattatttagttactttagttgagagtaaccctaaaactaaaaagcccaacgcagccgacttattagtaagtgtattggaggctgcaactttattaggtacttcagtagagcaggtttataggttgtaccaaaatggtattttgcaaacggcatttcgtcataaaatgaaccagcggatcaacccttataagggcgcgttttttttaagacatgttatagagtacaaaaccagttttggaaatgacaaagctagaatgtatttgtcggcatggtgagtatatgcatcttaaggaactgctagagattacagacaccactgagcgggataggtcattacgtcgtgcttttagcccttatacggcaatgattgatataacaggcagcgaagccgttgccctgattattttgttaaacctgacttatcgaaaaaaccaagttgatgacttgctggataaaaagctcgcaaaacaggctttaaaaagtgaagaccatattaataaatgtattaaggaaatagcgtggtttcatactcataatttaaagtaccctgacattagagtcagtaagcaaaatttagccgtagagcctccaacactgcactcttatgttttgagtagtgctaactatcctaaagcctatggctggtcacataactcagctaaagttaattttgctaaattatttgttagttactttaaatggcaaaatcaagtcagttggctggcacaagtattagctacgaactcggataactggaaatccgcatttacctctcttgggttatccgttaaggcatttaaaagtttatgtgtaaccgttaaaaattcattgcctgaagaggccattcccgactctgttgaccgctactctcgccaaattagaatgccttatcatgatggttacttagctgttacgcctgtaattagccatgttgttcaatcaaaaattcaacaggcggcaattgataaacgagcccgatttagcaatgtagagtttacgcgtcctgctgctgtcagtatgttagctgcttccttaggtggtgttattaatgtgcttaattaccctccttatatacgaagtaaatatcatggtttaagtaactcacgagcatttaaattaaataatgggcaaacagtatttaacgttgaggcactattaaagccggaattaattaaagccttagaaggtattatatttagtaataatgcgctggctcttaaacagcgtagacaacaaaaagtaaaaaatattaaagagctgagaaacacgcttttagaatggttttcacctgtatttgaatggcgcttggacgctattgagaatgggtatgacttagaacagcttgagagtgcttcagagcgactagagtataaaatactatcgctacccgacaatgaactcccttcgctaacgattcctttatttaggttactaaatgaaatgcttggcggtgtgagcatgacacaaaggtatgcttttcatcctaaattaatgagccctttaaaagcagctttacaatggttgcttgttaatcttacagatcaaaaacatgtactgattgaagaagatgatgaacattatcgctatcttcatttaagcggtatacgtgtgtttgatgcgcaagcattatcaaacccttactgctcaggtattccatctttaaccgctgtttggggtatgattcacagctaccaaagaaaacttaatgaggcgctaggaacaaatgtacggttcacatccttttcttggtttattaggaattattctgctgtagcaggaaaaaaacttcctgaactgagccttcaaggcgctcagcaaagtaggctcaagcggccaggaattatcgatggcaaatactgtgatttggtatttgatttaataatacacattgatggttatgaagatgacttacaggcagtagatagtaagcctgacattttgaaagcgcattttccatctaactttgcaggtggtgttatgcatcagcctgagcttaactcaaatataaattggtgctgtttatatagtaatgaaaatcagttatttgaaaagttaaggcgactccctttatctggttgttgggttatgccaactgagcacaaaatacaggatttagatgagctactcttattattaaatagtgactctaaactaagcccatctatgatgggatatatgttactcaccgaaccgatggctagagttggatcacttgaaagactgcattgttatgctgaaccagcaataggagtggtgaaatacgaagcggccactagtgtaaggctaaaaggtattggtaactattttaatagcgctttttggatgctagatgcacaagaaaagtttatgctaatgaaaaaagtttaaccggaaaatacttaatggagctctgtaatatattaaaatatgatcgctcgctttaccctggtaaagctgtgtttttttataaaacggctgactctgattttgttccactagaggctgatattaataaaattcgaggccctaaatctggttttactgaagcattcaccccacagttttccccaaaaaacatctcacctcaggacttaacacataataatatattaactctcgaagagtgttatgtacctccaaatgtggagcatatattttgtcggttttctttgagagtacaggctaactcgttggtcccttcaggctgtagtgatccagaggttttttctttattaaaagagttggcagaaacatttaaagaatgcggtggttataaagaactagcagtaagatattgtcgaaatattttgataggtacatggctttggcgtaatcaaaacaccggcaacactcaaattgaaattaaaaccagcaaagggagttgttatttaatcgataacactcgtaagttagcttgggaaagcaaatgggcttctgatgatctaaaagtattggaagagcttagtaatgaaattgagagcgcattaactgatcccaatgtgttttggagtgctgatataaccgcgaaaatagaagcctcattttgccaagagatttacccaagccaaatccttaacgacaaggttaagcaaggagaggcctcaaaacagtttgtaaaagctaagtgtgcagatggccgttacgctgtaagttttaattcagtaaaaataggagcagcccttcagtcaatagatgattggtgggatgaggatgcaagtaaaagattacgagtgcatgagtttggtgctgataaagaaataggggttgcccgacgtcctcctgattctgaacagaatttttattctattttcaaaaatacggaatggtatttgtcagcccttaaaaattgcattactaataaaaatgaaaaaatagacccagctatttattacttattctctgtattgattaagggcggaatgttccagaaaaaagcagaggctaaaaaggcgtaattatgcaaaggtattacttcacagtccactttttaccaaaacaagctaatctagcgctgcttactggccgttgtatttctattatgcatgggtttattttgaagcataatattgaaggaatgggggttacgtttcctgcatggtcggactcatcaattggtaatgaaattgcttttgtttacacggacaaggagattttaaatacccttaaagatcaggcatattttgtggacatgcaagattgtggcttttttaaagtaagccaagttttagctgtacctgacagctgcgaagaagtacgttttatacgtaatcaggcggtagcaaaaattttcacaggtgaaagtagaagaagattaaagcgcctgcaaaaaagagcgttagcaagaggtgaagattttaatcctaaaaagatcgaagctccccgagagattgatattttccatagagtggctatgactagtaagagttcacaagaggattatattctgcatattcaaaagcaagatgttgactgccaagctgagccatactttagtaattatgggcttgcctcaaatgaaaagtttaaaggcacggttccggatttatcaccctcaatagatagaaattaacctttaataaggagatatagcatgtatatacgcaacttgagaaagccatctccaaataaaaatgtatttaaatttgcgagcactaaagttagtagtgtagttatgtgtgagagttcattagagtttgatgcatgttttcatcatgaatataacgatttgatagagagttttgggagtcagcctgaaggctttaaatatgagtttatgggtaaaagtttaccttacacaccagatgcactgatttcatatacagataaaacccaaaaataccacgaatataagccctattctaaaattgcttctccactatttagagctgaatttgctgccaaaagagctgcatcattaaaattggggattgatcttgttttagtaactgataggcaaattagggtaaatccaatattaaacaacttaaagttattacaccgctactcaggtgtttatggtatcagcggcattcaaaaagagttgctcagttttattcataaatcaggggtaatcaagctaaatgatataagctctcaggttgggataccaattggtgaaacacgatcttttttatttgggctcatgcataaagggttggttaaggctgatctagggtgtgatgatttaactaataatccaacattatgggctacaccaggcagcggctccggaaaacggacagccgacggaagcgagttcgagtcaccaaagaagaagcggaaagtcggatcctctggaggttcatccggcggaagtagcgggtccgaaaccccaggcaccagcgagtccgcgaccccggagtccagcggttctgaaacgccgggtacttcagagtctgctaccccggaatcttctggcagcgaaaccccgggtacgagcgagagcgcaaccccggaatcgtccggcggtagcagcggtggtagctcgaccatgggaacaaaatcagaactaatagagaggttggctacccagcaaagccacatcccggcaaagacggtggaagatgccgtcaaggagatgctggagcacatggcgtccaccctggcgcaaggtgggtctggcggtttgaccaaagcggaaatgagcgaatatctgttcgacaagctcggcctgtcgaaacgtgacgcgaaagagttagttgagttgttcttcgaggaaatccgcagagcgctggagaacggcgaacaggttaaactgtccggtttcggcaattttgatctgcgcgacaagaaccagcgtccgggtcgcaacccgaaaaccggtgaggacatcccgattaccgcacgtcgtgtggttacctttcgcccaggtcagaaactgaaaagccgtgtggaaaatgcgggtggcggcgaacgtattgagatccgtggtttcggctcttttagcctgcattatcgtgctccgcgtaccggccgtaacccgaaaaccggtgataaggtggagttggaaggtaagtacgttccgcattttaaaccgggtaaagaactgcgtgatcgtgccaatatttacggcgggggaagtggaggttcaggaggctctgggggctccggcggtagcggtggtagcatgactgacttttttaatgaatttgatgaaagcctggtaccattaaagccacaaacgcccacacaatacgtcaaattagatgatgccaacttaatccagcgtgatttggataccttttcagatacctttaaaaaccaagcactacaaaggtataagctaattagcactatagataaaaaactttcacgcggctggacccaacgaaatttagatcctattttagatgagctttttaaaggaggtgacgtagttcggccaaattggcgaactgttgctcgttggcgcaaaaaatatatcgaaagcaacggtgatatagcctcccttgctgataaaaaccacaaaatgggaaacagaactaaccgtataaaaggggatgataaattttttgataaagcattagaacgatttttagatgctaaaagacctactatagcaactgcatatcagtactataaagaccttattgttattgaaaatgagagtattgtcgaaggcaagattccaataatatcctacaatgcgtttaataaaagaatcaaagcaatacccccatacgcggtcgcggtcgcaaggcatggtaaatttaaagcagaccaatggtttgcttactgcgctgcgcacgtacccccgacaagaatattagagcgtgtagagattgatcatacaccacttgatttaatcctacttgatgatgagttacttattcccataggaagaccttacctaacattacttattgatgtatttagtggctgtgttcttggttttcatcttagttataaatccccttcctacgtatctgctgctaaggctattactcatgcgattaaaccaaagtctcttgatgctctgaatatagaactacaaaatgattggccttgctttggtaaatttgaaaatttagttgtagataatggtgctgagttttggtctaaaaacttagagcatgcttgtcagtcagcaggaataaatatccaatataaccctgtgcgcaagccttggctaaaaccctttatagagcgtttttttggggtgatgaatgaatatttcttacctgaattaccaggaaagacattttcaaatattttagaaaaagaagagtataaacctgagaaagatgcaattatgcgcttctcaacttttgttgaagaatttcaccgctggatcgcggatgtgtatcatcaagacagtaattcacgtgaaactcgaatcccaattaaacgttggcaacaagggtttgatgcatatcccccattgaccatgaatgaagaggaggaaacgcgtttttcaatgttaatgcgcatctcagactcaagaacgttaacgagaaatgggtttaaatatcaagagttaatgtatgactcaacagctttggctgattatcgtaaacattatccgcaaacaaaagaaactgtaaaaaaactgattaaagtagaccctgatgacatctcaaaaatttatgtttatttagaagagttagaaagttatctcgaagtaccgtgtacagatcctaccggctatacggatggtttaagtatctatgagcataaaacaataaaaaaaattaacagggaagtcatacgggaatctaaagatagtttgggcttagcgaaagcacgcatggctattcatgagcgagtaaagcaagagcaagaagttttcattgaatcaaaaactaaagctaagataacagctgttaaaaagcaagctcaaatagctgatgtaagtaatacaggaacgagcactattaaggtttctgaagaaagtgcagcccctgtgcaaaaacatataagtaacgataattctgacgactgggatgatgacttagaggcatttgaatgaatgccttaacagagatacagatagagaagcttcggaactttagcgattgcatcgttatgcacccgcaaattaaaacaatttttaatgactttgatgaattaagattaaaccgtaaatttcagtcagaccaacagtgtatgctattaattggtgatacaggtgttggaaaaagtcataccattaatcactacaaaaaaagagttctagctacacagaattatagtcgaaacactatgccagtcttagtaagtcgtatatctagggggaaaggcttagatgctactttagtccaaatgctggcagatctggagctatttggaagtagtcaaattaaaaagcgaggctacaaaacagaccttactaaaaagctcgtagagagcttaattaaagctcaagtagagctactcatcattaatgagtttcaggagttaatagagtttaaaagcgtacaagaacgacaacaaattgcaaatgggttaaagtttattagtgaagaggccaaagtgccaatagtactggttggtatgccttgggctgcaaaaatagctgaagaacctcaatgggcttctcgcttagttagaaaaagaaaacttgaatactttagcctaaaaaatgacagcaagtactttcgccaatatttgatggggttagctaagaaaatgccatttgatgtacctcctaagctcgaaagtaaaaataccacaatagcgttgtttgctgcatgtcgaggtgagaatcgagcccttaaacatctactgttggaggctttaaaattagcactaagttgtaatgagtatcttgaaaataaacattttattactgcttatgacaagtttgatttttttaatgataaggaaaaactaaaatcaaaaaatccttttaaacaagacattaaagatattgaaatttatgaggtaatcaaaaactcatcttataacccaaatgcattagacccagaagatatgctcacagatcgagtgtttgcaatagtaaagtaacctaggctgctgccaccgctgagcaataactagcataaccccttggggcctctaaacgggtcttgaggggttttttgctgaaacctcaggcatttgagaagcacacggtcacactgcttccggtagtcaataaaccggtaaaccagcaatagacataagcggctatttaacgaccctgccctgaaccgacgaccgggtcatcgtggccggatcttgcggcccctcggcttgaacgaattgttagacattatttgccgactaccttggtgatctcgcctt

SEQ ID NO: 5228 - DNA, 10435 bp, synthetic construct
  source 1..10435: mol_type = other DNA
catatatggagttccgcgttacataacttacggtaaatggcccgcctggctgaccgcccaacgacccccgcccattgacgtcaataatgacgtatgttcccatagtaacgccaatagggactttccattgacgtcaatgggtggagtatttacggtaaactgcccacttggcagtacatcaagtgtatcatatgccaagtacgccccctattgacgtcaatgacggtaaatggcccgcctggcattatgcccagtacatgaccttatgggactttcctacttggcagtacatctacgtattagtcatcgctattaccatggtgatgcggttttggcagtacatcaatgggcgtggatagcggtttgactcacggggatttccaagtctccaccccattgacgtcaatgggagtttgttttggcaccaaaatcaacgggactttccaaaatgtcgtaacaactccgccccattgacgcaaatgggcggtaggcgtgtacggtgggaggtctatataagcagagctcgtttagtgaaccgtcagatcgcctggagacgccatccacgctgttttgacctccatagaagacaccgggaccgatccagcctccggactctagaggatcgaacccttgccaccatgcccaagaagaagaggaaggtgggaggctccggaggaagcatgggcaccaagtccgagctgatcgagagactggctacacagcagagccacatccccgccaagaccgtggaagatgccgtgaaggagatgctggaacacatggccagcaccctggcccagggcggctccggcggcctgacaaaggccgagatgagcgagtacctgtttgacaagctgggcctgtctaagcgggacgccaaagagctggtcgagctgttcttcgaggaaattcggcgggccctggaaaacggcgagcaagtgaaactcagcggcttcggcaacttcgacctgcgggacaagaaccagcgcccaggaagaaaccccaagacaggcgaggacatccctatcaccgctagaagggttgtgaccttcagacctggacagaaactgaagtctcgggtggagaacgccggcggaggagaaagaatcgagatcagaggctttggcagcttcagcctgcactatagagcccctagaaccggcagaaatcctaagaccggagataaggtggaactggaaggcaagtacgtgcctcatttcaagcccggcaaagaactgagagatagagctaatatctacggcggtggcgggtccggcggtggatccggtaccggagggagtggtggaagcggcggttctggtggctcaggcggcagcggccggccaatggacaagaagtactccattgggctcgctatcggcacaaacagcgtcggctgggccgtcattacggacgagtacaaggtgccgagcaaaaaattcaaagttctgggcaataccgatcgccacagcataaagaagaacctcattggcgccctcctgttcgactccggggagacggccgaagccacgcggctcaaaagaacagcacggcgcagatatacccgcagaaagaatcggatctgctacctgcaggagatctttagtaatgagatggctaaggtggatgactctttcttccataggctggaggagtcctttttggtggaggaggataaaaagcacgagcgccacccaatctttggcaatatcgtggacgaggtggcgtaccatgaaaagtacccaaccatatatcatctgaggaagaagcttgtagacagtactgataaggctgacttgcggttgatctatctcgcgctggcgcatatgatcaaatttcggggacacttcctcatcgagggggacctgaacccagacaacagcgatgtcgacaaactctttatccaactggttcagacttacaatcagcttttcgaagagaacccgatcaacgcatccggagttgacgccaaagcaatcctgagcgctaggctgtccaaatcccggcggctcgaaaacctcatcgcacagctccctggggagaagaagaacggcctgtttggtaatcttatcgccctgtcactcgggctgacccccaactttaaatctaacttcgacctggccgaagatgccaagcttcaactgagcaaagacacctacgatgatgatctcgacaatctgctggcccagatcggcgaccagtacgcagacctttttttggcggcaaagaacctgtcagacgccattctgctgagtgatattctgcgagtgaacacggagatcaccaaagctccgctgagcgctagtatgatcaagcgctatgatgagcaccaccaagacttgactttgctgaaggcccttgtcagacagcaactgcctgagaagtacaaggaaattttcttcgatcagtctaaaaatggctacgccggatacattgacggcggagcaagccaggaggaattttacaaatttattaagcccatcttggaaaaaatggacggcaccgaggagctgctggtaaagcttaacagagaagatctgttgcgcaaacagcgcactttcgacaatggaagcatcccccaccagattcacctgggcgaactgcacgctatcctcaggcggcaagaggatttctacccctttttgaaagataacagggaaaagattgagaaaatcctcacatttcggataccctactatgtaggccccctcgcccggggaaattccagattcgcgtggatgactcgcaaatcagaagagaccatcactccctggaacttcgaggaagtcgtggataagggggcctctgcccagtccttcatcgaaaggatgactaactttgataaaaatctgcctaacgaaaaggtgcttcctaaacactctctgctgtacgagtacttcacagtttataacgagctcaccaaggtcaaatacgtcacagaagggatgagaaagccagcattcctgtctggagagcagaagaaagctatcgtggacctcctcttcaagacgaaccggaaagttaccgtgaaacagctcaaagaagactatttcaaaaagattgaatgtttcgactctgttgaaatcagcggagtggaggatcgcttcaacgcatccctgggaacgtatcacgatctcctgaaaatcattaaagacaaggacttcctggacaatgaggagaacgaggacattcttgaggacattgtcctcacccttacgttgtttgaagatagggagatgattgaagaacgcttgaaaacttacgctcatctcttcgacgacaaagtcatgaaacagctcaagaggcgccgatatacaggatgggggcggctgtcaagaaaactgatcaatgggatccgagacaagcagagtggaaagacaatcctggattttcttaagtccgatggatttgccaacaggaacttcatgcagttgatccatgatgactctctcacctttaaggaggacatccagaaagcacaagtttctggccagggggacagtcttcacgagcacatcgctaatcttgcaggtagcccagctatcaaaaagggaatactgcagaccgttaaggtcgtggatgaactcgtcaaagtaatgggaaggcataagcccgagaatatcgttatcgagatggcccgagagaaccaaactacccagaagggacagaagaacagtagggaaaggatgaagaggattgaagagggtataaaagaactggggtcccaaatccttaaggaacacccagttgaaaacacccagcttcagaatgagaagctctacctgtactacctgcagaacggcagggacatgtacgtggatcaggaactggacatcaatcggctctccgactacgacgtggatgctatcgtgccccagtcttttctcaaagatgattctattgataataaagtgttgacaagatccgataaaaatagagggaagagtgataacgtcccctcagaagaagttgtcaagaaaatgaaaaattattggcggcagctgctgaacgccaaactgatcacacaacggaagttcgataatctgactaaggctgaacgaggtggcctgtctgagttggataaagccggcttcatcaaaaggcagcttgttgagacacgccagatcaccaagcacgtggcccaaattctcgattcacgcatgaacaccaagtacgatgaaaatgacaaactgattcgagaggtgaaagttattactctgaagtctaagctggtctcagatttcagaaaggactttcagttttataaggtgagagagatcaacaattaccaccatgcgcatgatgcctacctgaatgcagtggtaggcactgcacttatcaaaaaatatcccaagcttgaatctgaatttgtttacggagactataaagtgtacgatgttaggaaaatgatcgcaaagtctgagcaggaaataggcaaggccaccgctaagtacttcttttacagcaatattatgaattttttcaagaccgagattacactggccaatggagagattcggaagcgaccacttatcgaaacaaacggagaaacaggagaaatcgtgtgggacaagggtagggatttcgcgacagtccggaaggtcctgtccatgccgcaggtgaacatcgttaaaaagaccgaagtacagaccggaggcttctccaaggaaagtatcctcccgaaaaggaacagcgacaagctgatcgcacgcaaaaaagattgggaccccaagaaatacggcggattcgattctcctacagtcgcttacagtgtactggttgtggccaaagtggagaaagggaagtctaaaaaactcaaaagcgtcaaggaactgctgggcatcacaatcatggagcgatcaagcttcgaaaaaaaccccatcgactttctcgaggcgaaaggatataaagaggtcaaaaaagacctcatcattaagcttcccaagtactctctctttgagcttgaaaacggccggaaacgaatgctcgctagtgcgggcgagctgcagaaaggtaacgagctggcactgccctctaaatacgttaatttcttgtatctggccagccactatgaaaagctcaaagggtctcccgaagataatgagcagaagcagctgttcgtggaacaacacaaacactaccttgatgagatcatcgagcaaataagcgaattctccaaaagagtgatcctcgccgacgctaacctcgataaggtgctttctgcttacaataagcacagggataagcccatcagggagcaggcagaaaacattatccacttgtttactctgaccaacttgggcgcgcctgcagccttcaagtacttcgacaccaccatagacagaaagcggtacacctctacaaaggaggtcctggacgccacactgattcatcagtcaattacggggctctatgaaacaagaatcgacctctctcagctcggtggagacggtggtagtggaggttcaggaggatccggggggagcggagggagcgctagcggtggaggctccggaggtggatctaaaaggccggcggccacgaaaaaggccggtcaggcaaaaaagaaaaagggtggtagtggaagcggagctactaacttcagcctgctgaagcaggctggagacgtggaggagaaccctggacctgcggccgcatgaaagggttcgatccctaccggttagtaatgagtttaaacgggggaggctaactgaaacacggaaggagacaataccggaaggaacccgcgctatgacggcaataaaaagacagaataaaacgcacgggtgttgggtcgtttgttcataaacgcggggttcggtcccagggctggcactctgtcgataccccaccgagaccccattggggccaatacgcccgcgtttcttccttttccccaccccaccccccaagttcgggtgaaggcccagggctcgcagccaacgtcggggcggcaggccctgccatagcagatctgcgcagctggggctctagggggtatccccacgcgccctgtagcggcgcattaagcgcggcgggtgtggtggttacgcgcagcgtgaccgctacacttgccagcgccctagcgcccgctcctttcgctttcttcccttcctttctcgccacgttcgccggctttccccgtcaagctctaaatcgggggctccctttagggttccgatttagtgctttacggcacctcgaccccaaaaaacttgattagggtgatggttcacgtagtgggccatcgccctgatagacggtttttcgccctttgacgttggagtccacgttctttaatagtggactcttgttccaaactggaacaacactcaaccctatctcggtctattcttttgatttataagggattttgccgatttcggcctattggttaaaaaatgagctgatttaacaaaaatttaacgcgaattaattctgtggaatgtgtgtcagttagggtgtggaaagtccccaggctccccagcaggcagaagtatgcaaagcatgcatctcaattagtcagcaaccaggtgtggaaagtccccaggctccccagcaggcagaagtatgcaaagcatgcatctcaattagtcagcaaccatagtcccgcccctaactccgcccatcccgcccctaactccgcccagttccgcccattctccgccccatggctgactaattttttttatttatgcagaggccgaggccgcctctgcctctgagctattccagaagtagtgaggaggcttttttggaggcctaggcttttgcaaaaagctcccgggagcttgtatatccattttcggatctgatcaagagacaggatgaggatcgtttcgcatgattgaacaagatggattgcacgcaggttctccggccgcttgggtggagaggctattcggctatgactgggcacaacagacaatcggctgctctgatgccgccgtgttccggctgtcagcgcaggggcgcccggttctttttgtcaagaccgacctgtccggtgccctgaatgaactgcaggacgaggcagcgcggctatcgtggctggccacgacgggcgttccttgcgcagctgtgctcgacgttgtcactgaagcgggaagggactggctgctattgggcgaagtgccggggcaggatctcctgtcatctcaccttgctcctgccgagaaagtatccatcatggctgatgcaatgcggcggctgcatacgcttgatccggctacctgcccattcgaccaccaagcgaaacatcgcatcgagcgagcacgtactcggatggaagccggtcttgtcgatcaggatgatctggacgaagagcatcaggggctcgcgccagccgaactgttcgccaggctcaaggcgcgcatgcccgacggcgaggatctcgtcgtgacccatggcgatgcctgcttgccgaatatcatggtggaaaatggccgcttttctggattcatcgactgtggccggctgggtgtggcggaccgctatcaggacatagcgttggctacccgtgatattgctgaagagcttggcggcgaatgggctgaccgcttcctcgtgctttacggtatcgccgctcccgattcgcagcgcatcgccttctatcgccttcttgacgagttcttctgagcgggactctggggttcgcgaaatgaccgaccaagcgacgcccaacctgccatcacgagatttcgattccaccgccgccttctatgaaaggttgggcttcggaatcgttttccgggacgccggctggatgatcctccagcgcggggatctcatgctggagttcttcgcccaccccaacttgtttattgcagcttataatggttacaaataaagcaatagcatcacaaatttcacaaataaagcatttttttcactgcattctagttgtggtttgtccaaactcatcaatgtatcttatcatgtctgtataccgtcgacctctagctagagcttggcgtaatcatggtcatagctgtttcctgtgtgaaattgttatccgctcacaattccacacaacatacgagccggaagcataaagtgtaaagcctggggtgcctaatgagtgagctaactcacattaattgcgttgcgctcactgcccgctttccagtcgggaaacctgtcgtgccagctgcattaatgaatcggccaacgcgcggggagaggcggtttgcgtattgggcgctcttccgcttcctcgctcactgactcgctgcgctcggtcgttcggctgcggcgagcggtatcagctcactcaaaggcggtaatacggttatccacagaatcaggggataacgcaggaaagaacatgtgagcaaaaggccagcaaaaggccaggaaccgtaaaaaggccgcgttgctggcgtttttccataggctccgcccccctgacgagcatcacaaaaatcgacgctcaagtcagaggtggcgaaacccgacaggactataaagataccaggcgtttccccctggaagctccctcgtgcgctctcctgttccgaccctgccgcttaccggatacctgtccgcctttctcccttcgggaagcgtggcgctttctcatagctcacgctgtaggtatctcagttcggtgtaggtcgttcgctccaagctgggctgtgtgcacgaaccccccgttcagcccgaccgctgcgccttatccggtaactatcgtcttgagtccaacccggtaagacacgacttatcgccactggcagcagccactggtaacaggattagcagagcgaggtatgtaggcggtgctacagagttcttgaagtggtggcctaactacggctacactagaagaacagtatttggtatctgcgctctgctgaagccagttaccttcggaaaaagagttggtagctcttgatccggcaaacaaaccaccgctggtagcggtggtttttttgtttgcaagcagcagattacgcgcagaaaaaaaggatctcaagaagatcctttgatcttttctacggggtctgacgctcagtggaacgaaaactcacgttaagggattttggtcatgagattatcaaaaaggatcttcacctagatccttttaaattaaaaatgaagttttaaatcaatctaaagtatatatgagtaaacttggtctgacagttaccaatgcttaatcagtgaggcacctatctcagcgatctgtctatttcgttcatccatagttgcctgactccccgtcgtgtagataactacgatacgggagggcttaccatctggccccagtgctgcaatgataccgcgagacccacgctcaccggctccagatttatcagcaataaaccagccagccggaagggccgagcgcagaagtggtcctgcaactttatccgcctccatccagtctattaattgttgccgggaagctagagtaagtagttcgccagttaatagtttgcgcaacgttgttgccattgctacaggcatcgtggtgtcacgctcgtcgtttggtatggcttcattcagctccggttcccaacgatcaaggcgagttacatgatcccccatgttgtgcaaaaaagcggttagctccttcggtcctccgatcgttgtcagaagtaagttggccgcagtgttatcactcatggttatggcagcactgcataattctcttactgtcatgccatccgtaagatgcttttctgtgactggtgagtactcaaccaagtcattctgagaatagtgtatgcggcgaccgagttgctcttgcccggcgtcaatacgggataataccgcgccacatagcagaactttaaaagtgctcatcattggaaaacgttcttcggggcgaaaactctcaaggatcttaccgctgttgagatccagttcgatgtaacccactcgtgcacccaactgatcttcagcatcttttactttcaccagcgtttctgggtgagcaaaaacaggaaggcaaaatgccgcaaaaaagggaataagggcgacacggaaatgttgaatactcatactcttcctttttcaatattattgaagcatttatcagggttattgtctcatgagcggatacatatttgaatgtatttagaaaaataaacaaataggggttccgcgcacatttccccgaaaagtgccacctgacgtcgacggatcgggagatctcccgatcccctatggtgcactctcagtacaatctgctctgatgccgcatagttaagccagtatctgctccctgcttgtgtgttggaggtcgctgagtagtgcgcgagcaaaatttaagctacaacaaggcaaggcttgaccgacaattgcatgaagaatctgcttagggttaggcgttttgcgctgcttcgcgatgtacgggccagatatacgcgttgacattgattattgactagttattaatagtaatcaattacggggtcattagttcatagcc

SEQ ID NO: 5229 - DNA, 120 bp, synthetic construct
  source 1..120: mol_type = other DNA
tgttgatgcaaccataaagtgatatttaataattatttataatcagcaacttaaccacaaaacaaccatatattgatatctcacaaaacaaccataagttgatatttttgtgaatcgagt

SEQ ID NO: 5230 - DNA, 75 bp, synthetic construct; identical to SEQ ID NO: 9
  source 1..75: mol_type = other DNA

SEQ ID NO: 5231 - DNA, 115 bp, synthetic construct; identical to SEQ ID NO: 10
  source 1..115: mol_type = other DNA

SEQ ID NO: 5232 - DNA, 20 bp, synthetic construct
  source 1..20: mol_type = other DNA
caaccataaagtgataacaa

SEQ ID NO: 5233 - DNA, 20 bp, synthetic construct
  source 1..20: mol_type = other DNA
caaccatatcttgatatcgc

SEQ ID NO: 5234 - DNA, 20 bp, synthetic construct
  source 1..20: mol_type = other DNA
caaccataagttgatatttt

SEQ ID NO: 5235 - DNA, 20 bp, synthetic construct
  source 1..20: mol_type = other DNA
aaaccatacgttgattttac

SEQ ID NO: 5236 - DNA, 20 bp, synthetic construct
  source 1..20: mol_type = other DNA
aaaccatacgctgaaataaa

SEQ ID NO: 5237 - DNA, 20 bp, synthetic construct
  source 1..20: mol_type = other DNA
caaccataccttgaaattgc

SEQ ID NO: 5238 - protein, 11 aa, synthetic construct
YNHKMIITPIN

SEQ ID NO: 5239 - protein, 4 aa, synthetic construct
LSHP

SEQ ID NO: 5240 - protein, 6 aa, synthetic construct
VDTTIK

SEQ ID NO: 5241 - protein, 6 aa, synthetic construct
IDNYHT

SEQ ID NO: 5242 - protein, 4 aa, synthetic construct
LIQP

SEQ ID NO: 5243 - protein, 13 aa, synthetic construct
NDNYTHKLIIITP

SEQ ID NO: 5244 - DNA, 115 bp, synthetic construct; identical to SEQ ID NO: 10
  source 1..115: mol_type = other DNA

SEQ ID NO: 5245 - DNA, 13 bp, synthetic construct
  source 1..13: mol_type = other DNA
aatcagcaactta

SEQ ID NO: 5246 - DNA, 13 bp, synthetic construct
  source 1..13: mol_type = other DNA
aatcagtgactta

SEQ ID NO: 5247 - DNA, 13 bp, synthetic construct
  source 1..13: mol_type = other DNA
aatcagcaactta

SEQ ID NO: 5248 - DNA, 13 bp, synthetic construct
  source 1..13: mol_type = other DNA
aatcaatccatta

SEQ ID NO: 5249 - DNA, 13 bp, synthetic construct
  source 1..13: mol_type = other DNA
aatcataggctta

SEQ ID NO: 5250 - DNA, 13 bp, synthetic construct
  source 1..13: mol_type = other DNA
tatcaaagtatta

SEQ ID NO: 5251 - DNA, 13 bp, synthetic construct
  source 1..13: mol_type = other DNA
tatcaacgtgtta

SEQ ID NO: 5252 - DNA, 13 bp, synthetic construct
  source 1..13: mol_type = other DNA
tttcaagtagtta

SEQ ID NO: 5253 - DNA, 13 bp, synthetic construct
  source 1..13: mol_type = other DNA
tatcaaagagtta

SEQ ID NO: 5254 - DNA, 13 bp, synthetic construct
  source 1..13: mol_type = other DNA
aatcaaaagctta

SEQ ID NO: 5255 - DNA, 13 bp, synthetic construct
  source 1..13: mol_type = other DNA
aatcaagagctta

SEQ ID NO: 5256 - DNA, 13 bp, synthetic construct
  source 1..13: mol_type = other DNA
aaagaacggtttg

SEQ ID NO: 5257 - DNA, 13 bp, synthetic construct
  source 1..13: mol_type = other DNA
aatcagaagctta

SEQ ID NO: 5258 - DNA, 13 bp, synthetic construct
  source 1..13: mol_type = other DNA
tattaacttacag

SEQ ID NO: 5259 - DNA, 13 bp, synthetic construct
  source 1..13: mol_type = other DNA
tatctgggtgtta

SEQ ID NO: 5260 - DNA, 13 bp, synthetic construct
  source 1..13: mol_type = other DNA
aatcaaatagtta

SEQ ID NO: 5261 - DNA, 13 bp, synthetic construct
  source 1..13: mol_type = other DNA
aatcaatccatta

SEQ ID NO: 5262 - DNA, 13 bp, synthetic construct
  source 1..13: mol_type = other DNA
tttcaatagctta

SEQ ID NO: 5263 - DNA, 13 bp, synthetic construct
  source 1..13: mol_type = other DNA
tatcaataactta

SEQ ID NO: 5264 - DNA, 13 bp, synthetic construct
  source 1..13: mol_type = other DNA
aatcaataagtta

SEQ ID NO: 5265 - DNA, 20 bp, synthetic construct
  source 1..20: mol_type = other DNA
caaccataaagtgatattta

SEQ ID NO: 5266 - DNA, 20 bp, synthetic construct
  source 1..20: mol_type = other DNA
caaccatatattgatatctc

SEQ ID NO: 5267 - DNA, 20 bp, synthetic construct
  source 1..20: mol_type = other DNA
caaccataagttgatatttt

SEQ ID NO: 5268 - DNA, 20 bp, synthetic construct
  source 1..20: mol_type = other DNA
caaccataaaatgataatta

SEQ ID NO: 5269 - DNA, 20 bp, synthetic construct
  source 1..20: mol_type = other DNA
cacccataaattgataatta

SEQ ID NO: 5270 - DNA, 20 bp, synthetic construct
  source 1..20: mol_type = other DNA
cacccataaattgatattgc

SEQ ID NO: 5271 - DNA, 18 bp, synthetic construct
  source 1..18: mol_type = other DNA
agctcnnnnnnnnggcca

SEQ ID NO: 5272 - DNA, 22 bp, synthetic construct
  source 1..22: mol_type = other DNA
aacaagctcnnnnnnnnggcca

SEQ ID NO: 5273 - DNA, 21 bp, synthetic construct
  source 1..21: mol_type = other DNA
aacagctcnnnnnnnnggcca

SEQ ID NO: 5274 - DNA, 20 bp, synthetic construct
  source 1..20: mol_type = other DNA
aacactcnnnnnnnnggcca

SEQ ID NO: 5275 - DNA, 19 bp, synthetic construct
  source 1..19: mol_type = other DNA
aacactnnnnnnnnggcca

SEQ ID NO: 5276 - DNA, 18 bp, synthetic construct
  source 1..18: mol_type = other DNA
aacacnnnnnnnnggcca

SEQ ID NO: 5277 - DNA, 18 bp, synthetic construct
  source 1..18: mol_type = other DNA
agctcnnnnnnnngtgtt

SEQ ID NO: 5278 - DNA, 19 bp, synthetic construct
  source 1..19: mol_type = other DNA
agctcnnnnnnnnggtgtt

SEQ ID NO: 5279 - DNA, 20 bp, synthetic construct
  source 1..20: mol_type = other DNA
agctcnnnnnnnnggctgtt

SEQ ID NO: 5280 - DNA, 21 bp, synthetic construct
  source 1..21: mol_type = other DNA
agctcnnnnnnnnggcctgtt

SEQ ID NO: 5281 - DNA, 22 bp, synthetic construct
  source 1..22: mol_type = other DNA
agctcnnnnnnnnggccatgtt

SEQ ID NO: 5282 - DNA, 11 bp, synthetic construct
  source 1..11: mol_type = other DNA
aaggaatatga

SEQ ID NO: 5283 - DNA, 11 bp, synthetic construct
  source 1..11: mol_type = other DNA
aggaatatgac

SEQ ID NO: 5284 - DNA, 11 bp, synthetic construct
  source 1..11: mol_type = other DNA
ggaatatgaca

SEQ ID NO: 5285 - DNA, 11 bp, synthetic construct
  source 1..11: mol_type = other DNA
gctgatggcgc

SEQ ID NO: 5286 - DNA, 11 bp, synthetic construct
  source 1..11: mol_type = other DNA
ctgatggcgcc

SEQ ID NO: 5287 - DNA, 11 bp, synthetic construct
  source 1..11: mol_type = other DNA
tgatggcgcca

SEQ ID NO: 5288 - DNA, 11 bp, synthetic construct
  source 1..11: mol_type = other DNA
taataactggc

SEQ ID NO: 5289 - DNA, 11 bp, synthetic construct
  source 1..11: mol_type = other DNA
aataactggcg

SEQ ID NO: 5290 - DNA, 11 bp, synthetic construct
  source 1..11: mol_type = other DNA
ataactggcgc

SEQ ID NO: 5291 - DNA, 11 bp, synthetic construct
  source 1..11: mol_type = other DNA
cattgttagca

SEQ ID NO: 5292 - DNA, 11 bp, synthetic construct
  source 1..11: mol_type = other DNA
attgttagcaa

SEQ ID NO: 5293 - DNA, 11 bp, synthetic construct
  source 1..11: mol_type = other DNA
ttgttagcaac

SEQ ID NO: 5294 - DNA, 11 bp, synthetic construct
  source 1..11: mol_type = other DNA
atgcccgatcg

SEQ ID NO: 5295 - DNA, 11 bp, synthetic construct
  source 1..11: mol_type = other DNA
tgcccgatcgt

SEQ ID NO: 5296 - DNA, 11 bp, synthetic construct
  source 1..11: mol_type = other DNA
gcccgatcgta

SEQ ID NO: 5297 - DNA, 11 bp, synthetic construct
  source 1..11: mol_type = other DNA
aattgactgaa

SEQ ID NO: 5298 - DNA, 11 bp, synthetic construct
  source 1..11: mol_type = other DNA
attgactgaat

SEQ ID NO: 5299 - DNA, 11 bp, synthetic construct
  source 1..11: mol_type = other DNA
ttgactgaata

SEQ ID NO: 5300 - DNA, 16 bp, synthetic construct
  source 1..16: mol_type = other DNA
attaatgttgttgatg

SEQ ID NO: 5301 - DNA, 16 bp, synthetic construct
  source 1..16: mol_type = other DNA
tatcaacaaatgtcag

SEQ ID NO: 5302 - DNA, 36 bp, synthetic construct
  source 1..36: mol_type = other DNA
attaatgttgttgatgcaaccataaagtgatattta

SEQ ID NO: 5303 - DNA, 13 bp, synthetic construct
  source 1..13: mol_type = other DNA
acatttgttgata

SEQ ID NO: 5304 - DNA, 12 bp, synthetic construct
  source 1..12: mol_type = other DNA
caaccataaatg

SEQ ID NO: 5305 - DNA, 14 bp, synthetic construct
  source 1..14: mol_type = other DNA
acatttgttgatat

SEQ ID NO: 5306 - DNA, 16 bp, synthetic construct
  source 1..16: mol_type = other DNA
acatttgttgatatgt

SEQ ID NO: 5307 - DNA, 13 bp, synthetic construct
  source 1..13: mol_type = other DNA
acatttgttgata

SEQ ID NO: 5308 - DNA, 11 bp, synthetic construct
  source 1..11: mol_type = other DNA
aatgttgttga

SEQ ID NO: 5309 - DNA, 13 bp, synthetic construct
  source 1..13: mol_type = other DNA
aatgttgttgatg

SEQ ID NO: 5310 - DNA, 14 bp, synthetic construct
  source 1..14: mol_type = other DNA
aatgttgttgatgt

SEQ ID NO: 5311 - DNA, 16 bp, synthetic construct
  source 1..16: mol_type = other DNA
aatgttgttgatgtgt

SEQ ID NO: 5312 - DNA, 130 bp, synthetic construct
  source 1..130: mol_type = other DNA
catgaaatgacctcttcatgaaaatgtcgtaaacttactgaagtttagaccatgaagaggcaatatcaatttatgggtgtgataattatcaatttatgggtgtaattatcattttatggttgtatcaaca

SEQ ID NO: 5313 - DNA, 122 bp, synthetic construct
  source 1..122: mol_type = other DNA
gtgtcggtgcgaatacgggtcgtagcaatgttggtctgactatgatcagaggcaatatcaatttatgggtgtgataattatcaatttatgggtgtaattatcattttatggttgtatcaaca

SEQ ID NO: 5314 - DNA, 39 bp, synthetic construct
  source 1..39: mol_type = other DNA
agacgggcccttgccctaggctctatctgggtgttacgg

SEQ ID NO: 5315 - DNA, 42 bp, synthetic construct
  source 1..42: mol_type = other DNA
gaatgtcacaaacaataacctcataaatcaataagttatgaa

SEQ ID NO: 5316 - DNA, 38 bp, synthetic construct
  source 1..38: mol_type = other DNA
cactggataggcatatcaataacttacaaaaaacctgc

SEQ ID NO: 5317 - DNA, 38 bp, synthetic construct
  source 1..38: mol_type = other DNA
acgctccattacaaatcaatccattaccaacacagtaa

SEQ ID NO: 5318 - DNA, 38 bp, synthetic construct
  source 1..38: mol_type = other DNA
tgcgatcacagaaaatcaaatagttaaaatcaatctaa

SEQ ID NO: 5319 - DNA, 36 bp, synthetic construct
  source 1..36: mol_type = other DNA
tataattactttaatatcaaagtattagaaaaatac

SEQ ID NO: 5320 - DNA, 38 bp, synthetic construct
  source 1..38: mol_type = other DNA
caatatttttatataaatcaatttcttaataaaaatac

SEQ ID NO: 5321 - DNA, 37 bp, synthetic construct
  source 1..37: mol_type = other DNA
taataattatttataatcagcaacttaaccacaaaac

SEQ ID NO: 5322 - DNA, 37 bp, synthetic construct
  source 1..37: mol_type = other DNA
aacgaatcaattaaaatcataggcttaatcgaaaaac

SEQ ID NO: 5323 - DNA, 39 bp, synthetic construct
  source 1..39: mol_type = other DNA
agacgaacaagtgaatgcggactgtaaagaacggtttgt

SEQ ID NO: 5324 - DNA, 38 bp, synthetic construct
  source 1..38: mol_type = other DNA
accaaactcggttttattaacttacagcgtggtaagtg

SEQ ID NO: 5325 - DNA, 38 bp, synthetic construct
  source 1..38: mol_type = other DNA
cgcacaaccataaatcagtgacttacgagtgttttata

SEQ ID NO: 5326 - DNA, 37 bp, synthetic construct
  source 1..37: mol_type = other DNA
gacagagctagctttcaagtagttacgaagaaatttg

SEQ ID NO: 5327 - DNA, 37 bp, synthetic construct
  source 1..37: mol_type = other DNA
acgcgaaccaactatcaacgtgttaaaatactatttg

SEQ ID NO: 5328 - DNA, 37 bp, synthetic construct
  source 1..37: mol_type = other DNA
attcgaaccaagtatcaaagagttaaagtactatttg

SEQ ID NO: 5329 - DNA, 38 bp, synthetic construct
  source 1..38: mol_type = other DNA
ggtcgcttcaaactttcaatagcttagttgaaaaatat

SEQ ID NO: 5330 - DNA, 39 bp, synthetic construct
  source 1..39: mol_type = other DNA
gccaaccacttataaatcagaagcttagttatttctctt

SEQ ID NO: 5331 - DNA, 38 bp, synthetic construct
  source 1..38: mol_type = other DNA
gctctcatataaaaatcaaaagcttagttttgaatttg

SEQ ID NO: 5332 - DNA, 38 bp, synthetic construct
  source 1..38: mol_type = other DNA
gccctcatctaaaaatcaagagcttaattttgagtttg

SEQ ID NO: 5333 - DNA, 57 bp, synthetic construct; identical to SEQ ID NO: 1
  source 1..57: mol_type = other DNA

SEQ ID NO: 5334 - protein, 15 aa, synthetic construct
TSVVMFHYNCGYISL

SEQ ID NO: 5335 - protein, 18 aa, synthetic construct
QYLWLIIIVGMFQYNDCG

SEQ ID NO: 5336 - protein, 8 aa, synthetic construct
NICGYFSL

SEQ ID NO: 5337 - protein, 9 aa, synthetic construct
VWLNIIIVG

SEQ ID NO: 5338 - DNA, 13 bp, synthetic construct
  source 1..13: mol_type = other DNA
aatcagcaactta

SEQ ID NO: 5339 - DNA, 12 bp, synthetic construct
  source 1..12: mol_type = other DNA
ccgactcaacgc

SEQ ID NO: 5340 - DNA, 13 bp, synthetic construct
  source 1..13: mol_type = other DNA
taagttgctgatt

SEQ ID NO: 5341 - protein, 6 aa, synthetic construct
GSGSGG

SEQ ID NO: 5342 - protein, 18 aa, synthetic construct
GGSGGSGGSGGSGGSGGS

SEQ ID NO: 5343 - DNA, 32 bp, synthetic construct
  source 1..32: mol_type = other DNA
cgagtatttcagcaaaactactgcagtaagaa

SEQ ID NO: 5344 - DNA, 47 bp, synthetic construct
  source 1..47: mol_type = other DNA
gatcatagtcagaccaacattgctacgacccgtattcgcaccgacac

SEQ ID NO: 5345 - DNA, 156 bp, synthetic construct
  source 1..156: mol_type = other DNA
tgttgatgcaaccataaagtgatattaataattatttataatcagcaacttaaccacaaaacaaccatatattgatatctcacaaaacaaccataagttgatatttttgtgaatcgagtatttcagcaaaactactgcagtaagaannnnnnnnnn

SEQ ID NO: 5346 - DNA, 132 bp, synthetic construct
  source 1..132: mol_type = other DNA
tgttgatacaaccataaaatgataattacacccataaattgataattatcacacccataaattgatattgcctctgatcatagtcagaccaacattgctacgacccgtattcgcaccgacacnnnnnnnnnn

SEQ ID NO: 5347 - DNA, 120 bp, synthetic construct
  source 1..120: mol_type = other DNA
tgttgatacaaccataaaatgataattacacccataaattgataattatcacacccataaattgatattgcctctgatcatagtcagaccaacattgctacgacccgtattcgcaccgac

SEQ ID NO: 5348 - DNA, 120 bp, synthetic construct
  source 1..120: mol_type = other DNA
tgttgatacaaccataaaatgataattacacccataaattgataattatcacacccataaattgatattgcctctgatcatagttaagttgctgattctacgacccgtattcgcaccgac

SEQ ID NO: 5349 - DNA, 120 bp, synthetic construct
  source 1..120: mol_type = other DNA
tgttgatacaaccataaaatgataattacacccataaattgataattatcacacccataaattgatattgcctctgatcatagtaatcagcaacttactacgacccgtattcgcaccgac

SEQ ID NO: 5350 - DNA, 120 bp, synthetic construct
  source 1..120: mol_type = other DNA
tgttgatacaaccataaaatgataattacacccataaattgataattatcacacccataaattgatattgcctctgatcatatttaataattaatttatatatttaagtcagcgcaccga

SEQ ID NO: 5351 - DNA, 119 bp, synthetic construct
  source 1..119: mol_type = other DNA
tgttgatacaaccataaaatgataattacacccataaattgataattatcacacccataaattgatattgcctctgatcataatatataaattaattattaaattagtcagcgcaccga

SEQ ID NO: 5352 - protein, 11 aa, synthetic construct
YNHKMIITPIN

SEQ ID NO: 5353 - protein, 4 aa, synthetic construct
LSHP

SEQ ID NO: 5354 - protein, 19 aa, synthetic construct
CGYNHKMIITPINGSLSPP

SEQ ID NO: 5355 - protein, 19 aa, synthetic construct
CGYNHKTIITPINGSLSHP

SEQ ID NO: 5356 - protein, 19 aa, synthetic construct
CGSNHKMIITPINGSLSHP

SEQ ID NO: 5357 - protein, 20 aa, synthetic construct
  VARIANT 20: note = Q or H
XVDTTIKGLLHPLIDNYHTX

SEQ ID NO: 5358 - protein, 20 aa, synthetic construct
  VARIANT 1: note = M, L, or V
XLIQPSNGNYTHKLIIITPX

SEQ ID NO: 5359 - protein, 20 aa, synthetic construct
  VARIANT 1: note = M, L, or V
XLIQPLNDNSTHNLIIITPX

SEQ ID NO: 5360 - protein, 20 aa, synthetic construct
  VARIANT 1: note = M, L, or V
XLIQPLNGNSTQILIIITPX

SEQ ID NO: 5361 - protein, 13 aa, synthetic construct
CRYNHKMIITPIN

SEQ ID NO: 5362 - protein, 13 aa, synthetic construct
CGYNHKMIITPIN

SEQ ID NO: 5363 - protein, 13 aa, synthetic construct
CSYNHKMIITPIN

SEQ ID NO: 5364 - protein, 12 aa, synthetic construct
YNHKMIITPING

SEQ ID NO: 5365 - protein, 12 aa, synthetic construct
YNHKMIITPINS

SEQ ID NO: 5366 - protein, 14 aa, synthetic construct
CRYNHKMIITPING

SEQ ID NO: 5367 - protein, 14 aa, synthetic construct
CRYNHKMIITPINS

SEQ ID NO: 5368 - protein, 14 aa, synthetic construct
CGYNHKMIITPING

SEQ ID NO: 5369 - protein, 14 aa, synthetic construct
CGYNHKMIITPINS

SEQ ID NO: 5370 - protein, 14 aa, synthetic construct
CSYNHKMIITPING

SEQ ID NO: 5371 - protein, 14 aa, synthetic construct
CSYNHKMIITPINS

SEQ ID NO: 5372 - protein, 5 aa, synthetic construct
SLSHP

SEQ ID NO: 5373 - protein, 17 aa, synthetic construct
YNHKMIITPINGSLSHP

SEQ ID NO: 5374 - protein, 17 aa, synthetic construct
YNHKMIITPINSSLSHP

SEQ ID NO: 5375 - protein, 19 aa, synthetic construct
CRYNHKMIITPINGSLSHP

SEQ ID NO: 5376 - protein, 19 aa, synthetic construct
CRYNHKMIITPINSSLSHP

SEQ ID NO: 5377 - protein, 19 aa, synthetic construct
CGYNHKMIITPINGSLSHP

SEQ ID NO: 5378 - protein, 19 aa, synthetic construct
CGYNHKMIITPINSSLSHP

SEQ ID NO: 5379 - protein, 19 aa, synthetic construct
CSYNHKMIITPINGSLSHP

SEQ ID NO: 5380 - protein, 19 aa, synthetic construct
CSYNHKMIITPINSSLSHP

SEQ ID NO: 5381 - protein, 13 aa, synthetic construct
GRYNHKMIITPIN

SEQ ID NO: 5382 - protein, 13 aa, synthetic construct
GGYNHKMIITPIN

SEQ ID NO: 5383 - protein, 13 aa, synthetic construct
GSYNHKMIITPIN

SEQ ID NO: 5384 - protein, 14 aa, synthetic construct
GRYNHKMIITPINS

SEQ ID NO: 5385 - protein, 14 aa, synthetic construct
GRYNHKMIITPING

SEQ ID NO: 5386 - protein, 14 aa, synthetic construct
GRYNHKMIITPING

SEQ ID NO: 5387 - protein, 14 aa, synthetic construct
GGYNHKMIITPING

SEQ ID NO: 5388 - protein, 14 aa, synthetic construct
GGYNHKMIITPINS

SEQ ID NO: 5389 - protein, 14 aa, synthetic construct
GSYNHKMIITPING

SEQ ID NO: 5390 - protein, 14 aa, synthetic construct
GSYNHKMIITPINS

SEQ ID NO: 5391 - protein, 19 aa, synthetic construct
GRYNHKMIITPINGSLSHP

SEQ ID NO: 5392 - protein, 19 aa, synthetic construct
GRYNHKMIITPINSSLSHP

SEQ ID NO: 5393 - protein, 19 aa, synthetic construct
GGYNHKMIITPINGSLSHP

SEQ ID NO: 5394 - protein, 19 aa, synthetic construct
GGYNHKMIITPINSSLSHP

SEQ ID NO: 5395 - protein, 19 aa, synthetic construct
GSYNHKMIITPINGSLSHP

SEQ ID NO: 5396 - protein, 19 aa, synthetic construct
GSYNHKMIITPINSSLSHP

SEQ ID NO: 5397 - protein, 13 aa, synthetic construct
SRYNHKMIITPIN

SEQ ID NO: 5398 - protein, 13 aa, synthetic construct
SGYNHKMIITPIN

SEQ ID NO: 5399 - protein, 13 aa, synthetic construct
SSYNHKMIITPIN

SEQ ID NO: 5400 - protein, 14 aa, synthetic construct
SRYNHKMIITPING

SEQ ID NO: 5401 - protein, 14 aa, synthetic construct
SRYNHKMIITPINS

SEQ ID NO: 5402 - protein, 14 aa, synthetic construct
SGYNHKMIITPING

SEQ ID NO: 5403 - protein, 14 aa, synthetic construct
SGYNHKMIITPINS

SEQ ID NO: 5404 - protein, 14 aa, synthetic construct
SSYNHKMIITPING

SEQ ID NO: 5405 - protein, 14 aa, synthetic construct
SSYNHKMIITPINS

SEQ ID NO: 5406 - protein, 19 aa, synthetic construct
SRYNHKMIITPINGSLSHP

SEQ ID NO: 5407 - protein, 19 aa, synthetic construct
SRYNHKMIITPINSSLSHP

SEQ ID NO: 5408 - protein, 19 aa, synthetic construct
SGYNHKMIITPINGSLSHP

SEQ ID NO: 5409 - protein, 19 aa, synthetic construct
SGYNHKMIITPINSSLSHP

SEQ ID NO: 5410 - protein, 19 aa, synthetic construct
SSYNHKMIITPINGSLSHP

SEQ ID NO: 5411 - protein, 19 aa, synthetic construct
SSYNHKMIITPINSSLSHP

SEQ ID NO: 5412 - protein, 11 aa, synthetic construct
YNPKMIITPIN

SEQ ID NO: 5413 - protein, 13 aa, synthetic construct
CRYNPKMIITPIN

SEQ ID NO: 5414 - protein, 13 aa, synthetic construct
CGYNPKMIITPIN

SEQ ID NO: 5415 - protein, 13 aa, synthetic construct
CSYNPKMIITPIN

SEQ ID NO: 5416 - protein, 12 aa, synthetic construct
YNPKMIITPING

SEQ ID NO: 5417 - protein, 12 aa, synthetic construct
YNPKMIITPINS

SEQ ID NO: 5418 - protein, 14 aa, synthetic construct
CRYNPKMIITPING

SEQ ID NO: 5419 - protein, 14 aa, synthetic construct
CRYNPKMIITPINS

SEQ ID NO: 5420 - protein, 14 aa, synthetic construct
CGYNPKMIITPING

SEQ ID NO: 5421 - protein, 14 aa, synthetic construct
CGYNPKMIITPINS

SEQ ID NO: 5422 - protein, 14 aa, synthetic construct
CSYNPKMIITPING

SEQ ID NO: 5423 - protein, 14 aa, synthetic construct
CSYNPKMIITPINS

SEQ ID NO: 5424 - protein, 17 aa, synthetic construct
YNPKMIITPINGSLSHP

SEQ ID NO: 5425 - protein, 17 aa, synthetic construct
YNPKMIITPINSSLSHP

SEQ ID NO: 5426 - protein, 19 aa, synthetic construct
CRYNPKMIITPINGSLSHP

SEQ ID NO: 5427 - protein, 19 aa, synthetic construct
CRYNPKMIITPINSSLSHP

SEQ ID NO: 5428 - protein, 19 aa, synthetic construct
CGYNPKMIITPINGSLSHP

SEQ ID NO: 5429 - protein, 19 aa, synthetic construct
CGYNPKMIITPINSSLSHP

SEQ ID NO: 5430 - protein, 19 aa, synthetic construct
CSYNPKMIITPINGSLSHP

SEQ ID NO: 5431 - protein, 19 aa, synthetic construct
CSYNPKMIITPINSSLSHP

SEQ ID NO: 5432 - protein, 4 aa, synthetic construct
LSPP

SEQ ID NO: 5433 - protein, 5 aa, synthetic construct
SLSPP

SEQ ID NO: 5434 - protein, 17 aa, synthetic construct
YNHKMIITPINGSLSPP

SEQ ID NO: 5435 - protein, 17 aa, synthetic construct
YNHKMIITPINSSLSPP

SEQ ID NO: 5436 - protein, 19 aa, synthetic construct
CRYNHKMIITPINGSLSPP

SEQ ID NO: 5437 - protein, 19 aa, synthetic construct
CRYNHKMIITPINSSLSPP

SEQ ID NO: 5438 - protein, 19 aa, synthetic construct
CGYNHKMIITPINSSLSPP

SEQ ID NO: 5439 - protein, 19 aa, synthetic construct
CSYNHKMIITPINGSLSPP

SEQ ID NO: 5440 - protein, 19 aa, synthetic construct
CSYNHKMIITPINSSLSPP

SEQ ID NO: 5441 - protein, 17 aa, synthetic construct
YNPKMIITPINGSLSPP

SEQ ID NO: 5442 - protein, 17 aa, synthetic construct
YNPKMIITPINSSLSPP

SEQ ID NO: 5443 - protein, 19 aa, synthetic construct
CRYNPKMIITPINGSLSPP

SEQ ID NO: 5444 - protein, 19 aa, synthetic construct
CRYNPKMIITPINSSLSPP

SEQ ID NO: 5445 - protein, 19 aa, synthetic construct
CGYNPKMIITPINGSLSPP

SEQ ID NO: 5446 - protein, 19 aa, synthetic construct
CGYNPKMIITPINSSLSPP

SEQ ID NO: 5447 - protein, 19 aa, synthetic construct
CSYNPKMIITPINGSLSPP

SEQ ID NO: 5448 - protein, 19 aa, synthetic construct
CSYNPKMIITPINSSLSPP

SEQ ID NO: 5449 - protein, 11 aa, synthetic construct
YNHKTIITPIN

SEQ ID NO: 5450 - protein, 13 aa, synthetic construct
CRYNHKTIITPIN

SEQ ID NO: 5451 - protein, 13 aa, synthetic construct
CGYNHKTIITPIN

SEQ ID NO: 5452 - protein, 13 aa, synthetic construct
CSYNHKTIITPIN

SEQ ID NO: 5453 - protein, 12 aa, synthetic construct
YNHKTIITPING

SEQ ID NO: 5454 - protein, 14 aa, synthetic construct
CRYNHKTIITPING

SEQ ID NO: 5455 - protein, 14 aa, synthetic construct
CRYNHKTIITPINS

SEQ ID NO: 5456 - protein, 14 aa, synthetic construct
CGYNHKTIITPING

SEQ ID NO: 5457 - protein, 14 aa, synthetic construct
CGYNHKTIITPINS

SEQ ID NO: 5458 - protein, 14 aa, synthetic construct
CSYNHKTIITPING

SEQ ID NO: 5459 - protein, 14 aa, synthetic construct
CSYNHKTIITPINS

SEQ ID NO: 5460 - protein, 17 aa, synthetic construct
YNHKTIITPINGSLSHP

SEQ ID NO: 5461 - protein, 17 aa, synthetic construct
YNHKTIITPINSSLSHP

SEQ ID NO: 5462 - protein, 19 aa, synthetic construct
CRYNHKTIITPINGSLSHP

SEQ ID NO: 5463 - protein, 19 aa, synthetic construct
CRYNHKTIITPINSSLSHP

SEQ ID NO: 5464 - protein, 19 aa, synthetic construct
CGYNHKTIITPINSSLSHP

SEQ ID NO: 5465 - protein, 19 aa, synthetic construct
CSYNHKTIITPINGSLSHP

SEQ ID NO: 5466 - protein, 19 aa, synthetic construct
CSYNHKTIITPINSSLSHP

SEQ ID NO: 5467 - protein, 11 aa, synthetic construct
SNHKMIITPIN

SEQ ID NO: 5468 - protein, 13 aa, synthetic construct
CRSNHKMIITPIN

SEQ ID NO: 5469 - protein, 13 aa, synthetic construct
CGSNHKMIITPIN

SEQ ID NO: 5470 - protein, 13 aa, synthetic construct
CSSNHKMIITPIN

SEQ ID NO: 5471 - protein, 12 aa, synthetic construct
SNHKMIITPING

SEQ ID NO: 5472 - protein, 12 aa, synthetic construct
SNHKMIITPINS

SEQ ID NO: 5473 - protein, 14 aa, synthetic construct
CRSNHKMIITPING

SEQ ID NO: 5474 - protein, 14 aa, synthetic construct
CRSNHKMIITPINS

SEQ ID NO: 5475 - protein, 14 aa, synthetic construct
CGSNHKMIITPING

SEQ ID NO: 5476 - protein, 14 aa, synthetic construct
CGSNHKMIITPINS

SEQ ID NO: 5477 - protein, 14 aa, synthetic construct
CSSNHKMIITPING

SEQ ID NO: 5478 - protein, 14 aa, synthetic construct
CSSNHKMIITPINS

SEQ ID NO: 5479 - protein, 17 aa, synthetic construct
SNHKMIITPINSSLSHP

SEQ ID NO: 5480 - protein, 19 aa, synthetic construct
CRSNHKMIITPINGSLSHP

SEQ ID NO: 5481 - protein, 19 aa, synthetic construct
CRSNHKMIITPINSSLSHP

SEQ ID NO: 5482 - protein, 19 aa, synthetic construct
CGSNHKMIITPINSSLSHP

SEQ ID NO: 5483 - protein, 19 aa, synthetic construct
CSSNHKMIITPINGSLSHP

SEQ ID NO: 5484 - protein, 19 aa, synthetic construct
CSSNHKMIITPINSSLSHP

SEQ ID NO: 5485 - protein, 9 aa, synthetic construct
YNHKMIIHP

SEQ ID NO: 5486 - protein, 7 aa, synthetic construct
IDNYHTP

SEQ ID NO: 5487 - protein, 17 aa, synthetic construct
YNHKMIIHPSIDNYHTP

SEQ ID NO: 5488 - protein, 11 aa, synthetic construct
CSYNHKMIIHP

SEQ ID NO: 5489 - protein, 19 aa, synthetic construct
CSYNHKMIIHPSIDNYHTP

SEQ ID NO: 5490 - protein, 11 aa, synthetic construct
CGYNHKMIIHP

SEQ ID NO: 5491 - protein, 19 aa, synthetic construct
CGYNHKMIIHPSIDNYHTP

SEQ ID NO: 5492 - protein, 11 aa, synthetic construct
CRYNHKMIIHP

SEQ ID NO: 5493 - protein, 19 aa, synthetic construct
CRYNHKMIIHPSIDNYHTP

SEQ ID NO: 5494 - protein, 17 aa, synthetic construct
YNHKMIITTHKLIIITP

SEQ ID NO: 5495 - protein, 17 aa, synthetic construct
YNHKMIITTPKLIIITP

SEQ ID NO: 5496 - protein, 17 aa, synthetic construct
YNHKMIITTHTLIIITP

SEQ ID NO: 5497 - protein, 17 aa, synthetic construct
YNHKMIITTPTLIIITP

SEQ ID NO: 5498 - protein, 19 aa, synthetic construct
CSYNHKMIITTHKLIIITP

SEQ ID NO: 5499 - protein, 19 aa, synthetic construct
CSYNHKMIITTPKLIIITP

SEQ ID NO: 5500 - protein, 19 aa, synthetic construct
CSYNHKMIITTHTLIIITP

SEQ ID NO: 5501 - protein, 19 aa, synthetic construct
CSYNHKMIITTPTLIIITP

SEQ ID NO: 5502 - protein, 19 aa, synthetic construct
CGYNHKMIITTHKLIIITP

SEQ ID NO: 5503 - protein, 19 aa, synthetic construct
CGYNHKMIITTPKLIIITP

SEQ ID NO: 5504 - protein, 19 aa, synthetic construct
CGYNHKMIITTHTLIIITP

SEQ ID NO: 5505 - protein, 19 aa, synthetic construct
CGYNHKMIITTPTLIIITP

SEQ ID NO: 5506 - protein, 19 aa, synthetic construct
CRYNHKMIITTHKLIIITP

SEQ ID NO: 5507 - protein, 19 aa, synthetic construct
CRYNHKMIITTPKLIIITP

SEQ ID NO: 5508 - protein, 19 aa, synthetic construct
CRYNHKMIITTHTLIIITP

SEQ ID NO: 5509 - protein, 19 aa, synthetic construct
CRYNHKMIITTPTLIIITP

SEQ ID NO: 5510 - protein, 13 aa, synthetic construct
CLYNHKMIITPIN

SEQ ID NO: 5511 - protein, 11 aa, synthetic construct
NNHKMIITPIN

SEQ ID NO: 5512 - protein, 11 aa, synthetic construct
YIHKMIITPIN

SEQ ID NO: 5513 - protein, 11 aa, synthetic construct
YTHKMIITPIN

SEQ ID NO: 5514 - protein, 11 aa, synthetic construct
YSHKMIITPIN

SEQ ID NO: 5515 - protein, 11 aa, synthetic construct
YNNKMIITPIN

SEQ ID NO: 5516 - protein, 11 aa, synthetic construct
YNLKMIITPIN

SEQ ID NO: 5517 - protein, 11 aa, synthetic construct
YNQKMIITPIN

SEQ ID NO: 5518 - protein, 11 aa, synthetic construct
YNHIMIITPIN

SEQ ID NO: 5519 - protein, 11 aa, synthetic construct
YNHTMIITPIN

SEQ ID NO: 5520 - protein, 11 aa, synthetic construct
YNHKLIITPIN

SEQ ID NO: 5521 - protein, 11 aa, synthetic construct
YNHKVIITPIN

SEQ ID NO: 5522 - protein, 11 aa, synthetic construct
YNHKIIITPIN

SEQ ID NO: 5523 - protein, 11 aa, synthetic construct
YNHKMIITPII

SEQ ID NO: 5524 - protein, 11 aa, synthetic construct
YNHKMIITPIT

SEQ ID NO: 5525 - protein, 11 aa, synthetic construct
YNHKMIITPIS

SEQ ID NO: 5526 - protein, 11 aa, synthetic construct
YNHKMIITPIS

SEQ ID NO: 5527 - protein, 12 aa, synthetic construct
YNHKMIITPINL

SEQ ID NO: 5528 - protein, 5 aa, synthetic construct
QLSHP

SEQ ID NO: 5529 - protein, 5 aa, synthetic construct
LLSHP

SEQ ID NO: 5530 - protein, 14 aa, synthetic construct
CGYNHKMIITPINL

SEQ ID NO: 5531 - protein, 14 aa, synthetic construct
CLYNHKMIITPING

SEQ ID NO: 5532 - protein, 14 aa, synthetic construct
CLYNHKMIITPINL

SEQ ID NO: 5533 - protein, 14 aa, synthetic construct
CLYNHKMIITPINS

SEQ ID NO: 5534 - protein, 17 aa, synthetic construct
YNHKMIITPINGLLSHP

SEQ ID NO: 5535 - protein, 17 aa, synthetic construct
YNHKMIITPINLLLSHP

SEQ ID NO: 5536 - protein, 17 aa, synthetic construct
YNHKMIITPINSLLSHP

SEQ ID NO: 5537 - protein, 19 aa, synthetic construct
CGYNHKMIITPINGLLSHP

SEQ ID NO: 5538 - protein, 19 aa, synthetic construct
CGYNHKMIITPINLLLSHP

SEQ ID NO: 5539 - protein, 19 aa, synthetic construct
CGYNHKMIITPINSLLSHP

SEQ ID NO: 5540 - protein, 19 aa, synthetic construct
CLYNHKMIITPINGLLSHP

SEQ ID NO: 5541 - protein, 19 aa, synthetic construct
CLYNHKMIITPINLLLSHP

SEQ ID NO: 5542 - protein, 19 aa, synthetic construct
CLYNHKMIITPINSLLSHP

SEQ ID NO: 5543 - protein, 4 aa, synthetic construct
LSNP

SEQ ID NO: 5544 - protein, 4 aa, synthetic construct
LSLP

SEQ ID NO: 5545 - protein, 7 aa, synthetic construct
XVDTTIK

SEQ ID NO: 5546 - protein, 7 aa, synthetic construct
  VARIANT 7: note = Q or H
IDNYHTX

SEQ ID NO: 5547 - protein, 8 aa, synthetic construct
XVDTTIKG

SEQ ID NO: 5548 - protein, 8 aa, synthetic construct
XVDTTIKS

SEQ ID NO: 5549 - protein, 4 aa, synthetic construct
SLHP

SEQ ID NO: 5550 - protein, 12 aa, synthetic construct
XVDTTIKGSLHP

SEQ ID NO: 5551 - protein, 12 aa, synthetic construct
XVDTTIKSSLHP

SEQ ID NO: 5552 - protein, 11 aa, synthetic construct
  VARIANT 11: note = Q or H
LHPSIDNYHTX

SEQ ID NO: 5553 - protein, 12 aa, synthetic construct
  VARIANT 12: note = Q or H
SLHPSIDNYHTX

SEQ ID NO: 5554 - protein, 20 aa, synthetic construct
  VARIANT 20: note = Q or H
XVDTTIKGSLHPSIDNYHTX

SEQ ID NO: 5555 - protein, 20 aa, synthetic construct
  VARIANT 20: note = Q or H
XVDTTIKSSLHPSIDNYHTX

SEQ ID NO: 5556 - protein, 4 aa, synthetic construct
SLPP

SEQ ID NO: 5557 - protein, 12 aa, synthetic construct
XVDTTIKGSLPP

SEQ ID NO: 5558 - protein, 12 aa, synthetic construct
XVDTTIKSSLPP

SEQ ID NO: 5559 - protein, 11 aa, synthetic construct
  VARIANT 11: note = Q or H
LPPSIDNYHTX

SEQ ID NO: 5560 - protein, 12 aa, synthetic construct
  VARIANT 12: note = Q or H
SLPPSIDNYHTX

SEQ ID NO: 5561 - protein, 20 aa, synthetic construct
  VARIANT 20: note = Q or H
XVDTTIKGSLPPSIDNYHTX

SEQ ID NO: 5562 - protein, 20 aa, synthetic construct
  VARIANT 20: note = Q or H
XVDTTIKSSLPPSIDNYHTX

SEQ ID NO: 5563 - protein, 6 aa, synthetic construct
  VARIANT 6: note = Q or H
IDNYPX

SEQ ID NO: 5564 - protein, 11 aa, synthetic construct
  VARIANT 11: note = Q or H
LHPSIDNYPTX

SEQ ID NO: 5565 - protein, 12 aa, synthetic construct
  VARIANT 12: note = Q or H
SLHPSIDNYPTX

SEQ ID NO: 5566 - protein, 20 aa, synthetic construct
  VARIANT 20: note = Q or H
XVDTTIKGSLHPSIDNYPTX

SEQ ID NO: 5567 - protein, 20 aa, synthetic construct
  VARIANT 20: note = Q or H
XVDTTIKSSLHPSIDNYPTX

SEQ ID NO: 5568 - protein, 11 aa, synthetic construct
LHPSIDNYHTP

SEQ ID NO: 5569 - protein, 12 aa, synthetic construct
SLHPSIDNYHTP

SEQ ID NO: 5570 - protein, 20 aa, synthetic construct
XVDTTIKGSLHPSIDNYHTP

SEQ ID NO: 5571 - protein, 20 aa, synthetic construct
XVDTTIKSSLHPSIDNYHTP

SEQ ID NO: 5572 - protein, 11 aa, synthetic construct
  VARIANT 11: note = Q or H
LPPSIDNYPTX

SEQ ID NO: 5573 - protein, 20 aa, synthetic construct
  VARIANT 1: note = M, L, or V
XGVIIIILLVLLSLNGSISX

SEQ ID NO: 5574 - protein, 20 aa, synthetic construct
  VARIANT 1: note = M, L, or V
XGVIIIILGVLLSLNGSISX

SEQ ID NO: 5575 - protein, 20 aa, synthetic construct
  VARIANT 1: note = M, L, or V
XGVIIIILWVLLSFYGCINX

SEQ ID NO: 5576 - protein, 20 aa, synthetic construct
  VARIANT 1: note = M, L, or V
XGVIIIILWVLLSLYGCINX

SEQ ID NO: 5577 - protein, 20 aa, synthetic construct
  VARIANT 1: note = M, L, or V
XGVIIIILWVLLSLNGCINX

SEQ ID NO: 5578 - protein, 20 aa, synthetic construct
  VARIANT 1: note = M, L, or V
XGVIIIILWVLLSLYGSINX

SEQ ID NO: 5579 - protein, 20 aa, synthetic construct
  VARIANT 1: note = M, L, or V
XGVIIIILWVLLSLYGCIIX

SEQ ID NO: 5580 - protein, 20 aa, synthetic construct
  VARIANT 1: note = M, L, or V
XGVIIIILWVLLSLYGCITX

SEQ ID NO: 5581 - protein, 20 aa, synthetic construct
  VARIANT 1: note = M, L, or V
XGVIIIILWVLLSLYGCISX

SEQ ID NO: 5582 - protein, 20 aa, synthetic construct
  VARIANT 1: note = M, L, or V
XGVIIIILGVLLSLYGCINX

SEQ ID NO: 5583 - protein, 20 aa, synthetic construct
  VARIANT 1: note = M, L, or V
XGVIIIILLVLLSLYGCINX

SEQ ID NO: 5584 - protein, 20 aa, synthetic construct
  VARIANT 1: note = M, L, or V
XGVIIIILSVLLSLYGCINX

SEQ ID NO: 5585 - protein, 20 aa, synthetic construct
  VARIANT 1: note = M, L, or V
XGVIIIILWVLLSLNGSINX

SEQ ID NO: 5586 - protein, 20 aa, synthetic construct
  VARIANT 1: note = M, L, or V
XGVIIIILWVLLSLNGSIIX

SEQ ID NO: 5587 - protein, 20 aa, synthetic construct
  VARIANT 1: note = M, L, or V
XGVIIIILWVLLSLNGSISX

SEQ ID NO: 5588 - protein, 20 aa, synthetic construct
  VARIANT 1: note = M, L, or V
XGVIIIILWVLLSLYGSISX

SEQ ID NO: 5589 - protein, 20 aa, synthetic construct
  VARIANT 1: note = M, L, or V
XGVIIIILGVLLSLYGSISX

SEQ ID NO: 5590 - protein, 20 aa, synthetic construct
  VARIANT 1: note = M, L, or V
XGVIIIILLVLLSLYGSISX

SEQ ID NO: 5591 - protein, 10 aa, synthetic construct
  VARIANT 1: note = M, L, or V
XGVIIINLWV

SEQ ID NO: 5592 - protein, 9 aa, synthetic construct
LSFYGCINX

SEQ ID NO: 5593 - protein, 10 aa, synthetic construct
  VARIANT 1: note = M, L, or V
XGVIIIILWV

SEQ ID NO: 5594 - protein, 10 aa, synthetic construct
  VARIANT 1: note = M, L, or V
XGVIIITLWV

SEQ ID NO: 5595 - protein, 10 aa, synthetic construct
  VARIANT 1: note = M, L, or V
XGVIIISLWV

SEQ ID NO: 5596 - protein, 10 aa, synthetic construct
  VARIANT 1: note = M, L, or V
XGVIIINLGV

SEQ ID NO: 5597 - protein, 10 aa, synthetic construct
  VARIANT 1: note = M, L, or V
XGVIIINLLV

SEQ ID NO: 5598 - protein, 10 aa, synthetic construct
  VARIANT 1: note = M, L, or V
XGVIIINLSV

SEQ ID NO: 5599 - protein, 20 aa, synthetic construct
  VARIANT 1: note = M, L, or V
XGVIIINLWVQLSFYGCINX

SEQ ID NO: 5600 - protein, 20 aa, synthetic construct
  VARIANT 1: note = M, L, or V
XGVIIINLWVLLSFYGCINX

SEQ ID NO: 5601 - protein, 20 aa, synthetic construct
  VARIANT 1: note = M, L, or V
XGVIIINLWVSLSFYGCINX

SEQ ID NO: 5602 - protein, 9 aa, synthetic construct
LSLYGCINX

SEQ ID NO: 5603 - protein, 9 aa, synthetic construct
LSIYGCINX

SEQ ID NO: 5604 - protein, 9 aa, synthetic construct
LSVYGCINX

SEQ ID NO: 5605 - protein, 9 aa, synthetic construct
LSSYGCINX

SEQ ID NO: 5606 - protein, 9 aa, synthetic construct
LSFNGCINX

SEQ ID NO: 5607 - protein, 9 aa, synthetic construct
LSFSGCINX

SEQ ID NO: 5608 - protein, 9 aa, synthetic construct
LSFYGGINX

SEQ ID NO: 5609 - protein, 9 aa, synthetic construct
LSFYGCIIX

SEQ ID NO: 5610 - protein, 9 aa, synthetic construct
LSFYGCITX

SEQ ID NO: 5611 - protein, 9 aa, synthetic construct
LSFYGCISX

SEQ ID NO: 5612 - protein, 9 aa, synthetic construct
LSFYGSINX

SEQ ID NO: 5613 - protein, 20 aa, synthetic construct
  VARIANT 20: note = Q or H
XGCDNYQFMGVIIILWLYQX

SEQ ID NO: 5614 - protein, 20 aa, synthetic construct
  VARIANT 20: note = Q or H
XGSDNYQFMGVIIILWLYQX

SEQ ID NO: 5615 - protein, 20 aa, synthetic construct
  VARIANT 20: note = Q or H
XGGDNYQFMGVIIILWLYQX

SEQ ID NO: 5616 - protein, 20 aa, synthetic construct
  VARIANT 20: note = Q or H
XGCNNYQFMGVIIILWLYQX

SEQ ID NO: 5617 - protein, 20 aa, synthetic construct
  VARIANT 20: note = Q or H
XGCVNYQFMGVIIILWLYQX

SEQ ID NO: 5618 - protein, 20 aa, synthetic construct
  VARIANT 20: note = Q or H
XGCANYQFMGVIIILWLYQX

SEQ ID NO: 5619 - protein, 20 aa, synthetic construct
  VARIANT 20: note = Q or H
XGCGNYQFMGVIIILWLYQX

SEQ ID NO: 5620 - protein, 20 aa, synthetic construct
  VARIANT 20: note = Q or H
XGCDIYQFMGVIIILWLYQX

SEQ ID NO: 5621 - protein, 20 aa, synthetic construct
  VARIANT 20: note = Q or H
XGCDTYQFMGVIIILWLYQX

SEQ ID NO: 5622 - protein, 20 aa, synthetic construct
  VARIANT 20: note = Q or H
XGCDSYQFMGVIIILWLYQX

SEQ ID NO: 5623 - protein, 20 aa, synthetic construct
  VARIANT 20: note = Q or H
XGCDNNQFMGVIIILWLYQX

SEQ ID NO: 5624 - protein, 20 aa, synthetic construct
  VARIANT 20: note = Q or H
XGCDNSQFMGVIIILWLYQX

SEQ ID NO: 5625 - protein, 20 aa, synthetic construct
  VARIANT 20: note = Q or H
XGCDNYLFMGVIIILWLYQX

SEQ ID NO: 5626 - protein, 20 aa, synthetic construct
  VARIANT 20: note = Q or H
XGCDNYPFMGVIIILWLYQX

SEQ ID NO: 5627 - protein, 20 aa, synthetic construct
  VARIANT 20: note = Q or H
XGCDNYQLMGVIIILWLYQX

SEQ ID NO: 5628 - protein, 20 aa, synthetic construct
  VARIANT 20: note = Q or H
XGCDNYQIMGVIIILWLYQX

SEQ ID NO: 5629 - protein, 20 aa, synthetic construct
  VARIANT 20: note = Q or H
XGCDNYQVMGVIIILWLYQX

SEQ ID NO: 5630 - protein, 20 aa, synthetic construct
  VARIANT 20: note = Q or H
XGCDNYQSMGVIIILWLYQX

SEQ ID NO: 5631 - protein, 20 aa, synthetic construct
  VARIANT 20: note = Q or H
XGCDNYQFLGVIIILWLYQX

SEQ ID NO: 5632 - protein, 20 aa, synthetic construct
  VARIANT 20: note = Q or H
XGCDNYQFVGVIIILWLYQX

SEQ ID NO: 5633 - protein, 20 aa, synthetic construct
  VARIANT 20: note = Q or H
XGCDNYQFTGVIIILWLYQX

SEQ ID NO: 5634 - protein, 20 aa, synthetic construct
  VARIANT 20: note = Q or H
XGCDNYQFIGVIIILWLYQX

SEQ ID NO: 5635 - protein, 20 aa, synthetic construct
  VARIANT 20: note = Q or H
XGCDNYQFMGVIIILGLYQX

SEQ ID NO: 5636 - protein, 20 aa, synthetic construct
  VARIANT 20: note = Q or H
XGCDNYQFMGVIIILLLYQX

SEQ ID NO: 5637 - protein, 20 aa, synthetic construct
  VARIANT 20: note = Q or H
XGCDNYQFMGVIIILSLYQX

SEQ ID NO: 5638 - protein, 20 aa, synthetic construct
  VARIANT 20: note = Q or H
XGCDNYQFMGVIIILWLNQX

SEQ ID NO: 5639 - protein, 20 aa, synthetic construct
  VARIANT 20: note = Q or H
XGCDNYQFMGVIIILWLSQX

SEQ ID NO: 5640 - protein, 20 aa, synthetic construct
  VARIANT 20: note = Q or H
XGCDNYQFMGVIIILWLYLX

SEQ ID NO: 5641 - protein, 20 aa, synthetic construct
  VARIANT 20: note = Q or H
XGCDNYQFMGVIIILWLYPX

SEQ ID NO: 5642 - protein, 20 aa, synthetic construct
  VARIANT 20: note = Q or H
XGSGNYQFMGVIIILWLYQX

SEQ ID NO: 5643 - protein, 20 aa, synthetic construct
  VARIANT 20: note = Q or H
XGSGNYQIMGVIIILWLYQX

SEQ ID NO: 5644 - protein, 19 aa, synthetic construct
SVSQLSIYGCNYHFMVVST

SEQ ID NO: 5645 - protein, 19 aa, synthetic construct
SVSLLSIYGCNYHFMVVST

SEQ ID NO: 5646 - protein, 19 aa, synthetic construct
SVSSLSIYGCNYHFMVVST

SEQ ID NO: 5647 - protein, 19 aa, synthetic construct
SVSQLSIYGCNYHFLVVST

SEQ ID NO: 5648 - protein, 19 aa, synthetic construct
SVSLLSIYGCNYHFLVVST

SEQ ID NO: 5649 - protein, 19 aa, synthetic construct
SVSSLSIYGCNYHFLVVST

SEQ ID NO: 5650 - protein, 19 aa, synthetic construct
SVSQLSIYGCNYHLMVVST

SEQ ID NO: 5651 - protein, 19 aa, synthetic construct
SVSLLSIYGCNYHLMVVST

SEQ ID NO: 5652 - protein, 19 aa, synthetic construct
SVSSLSIYGCNYHLMVVST

SEQ ID NO: 5653 - protein, 19 aa, synthetic construct
SVSQLSIYGCNYLFMVVST

SEQ ID NO: 5654 - protein, 19 aa, synthetic construct
SVSLLSIYGCNYLFMVVST

SEQ ID NO: 5655 - protein, 19 aa, synthetic construct
SVSSLSIYGCNYLFMVVST

SEQ ID NO: 5656 - protein, 19 aa, synthetic construct
SVSQLSIYGCNNHFMVVST

SEQ ID NO: 5657 - protein, 19 aa, synthetic construct
SVSLLSIYGCNNHFMVVST

SEQ ID NO: 5658 - protein, 19 aa, synthetic construct
SVSSLSIYGCNNHFMVVST

SEQ ID NO: 5659 - protein, 19 aa, synthetic construct
SVSQLSIYGCIYHFMVVST

SEQ ID NO: 5660 - protein, 19 aa, synthetic construct
SVSLLSIYGCIYHFMVVST

SEQ ID NO: 5661 - protein, 19 aa, synthetic construct
SVSSLSIYGCIYHFMVVST

SEQ ID NO: 5662 - protein, 19 aa, synthetic construct
SVSQLSIYGGNYHFMVVST

SEQ ID NO: 5663 - protein, 19 aa, synthetic construct
SVSLLSIYGGNYHFMVVST

SEQ ID NO: 5664 - protein, 19 aa, synthetic construct
SVSSLSIYGGNYHFMVVST

SEQ ID NO: 5665 - protein, 19 aa, synthetic construct
SVSQLSINGCNYHFMVVST

SEQ ID NO: 5666 - protein, 19 aa, synthetic construct
SVSLLSINGCNYHFMVVST

SEQ ID NO: 5667 - protein, 19 aa, synthetic construct
SVSSLSINGCNYHFMVVST

SEQ ID NO: 5668 - protein, 19 aa, synthetic construct
SVSQLSIYGCNYHLLVVST

SEQ ID NO: 5669 - protein, 19 aa, synthetic construct
SVSLLSIYGCNYHLLVVST

SEQ ID NO: 5670 - protein, 19 aa, synthetic construct
SVSSLSIYGCNYHLLVVST

SEQ ID NO: 5671 - protein, 19 aa, synthetic construct
SVSQLSIYGCNYLLLVVST

SEQ ID NO: 5672 - protein, 19 aa, synthetic construct
SVSLLSIYGCNNHLLVVST

SEQ ID NO: 5673 - protein, 19 aa, synthetic construct
SVSSLSIYGCIYHLLVVST

SEQ ID NO: 5674 - protein, 19 aa, synthetic construct
SVSQLSIYGGNYHLLVVST

SEQ ID NO: 5675 - protein, 19 aa, synthetic construct
SVSLLSINGCNYHLLVVST

SEQ ID NO: 5676 - protein, 19 aa, synthetic construct
SVSSLSINGGNNLLLVVST

SEQ ID NO: 5677 - protein, 19 aa, synthetic construct
SVSQLSINGGINLLLVVST

SEQ ID NO: 5678 - protein, 15 aa, synthetic construct
LSIYGCNYHFMVVST

SEQ ID NO: 5679 - protein, 16 aa, synthetic construct
QLSIYGCNYHFMVVST

SEQ ID NO: 5680 - protein, 16 aa, synthetic construct
LLSIYGCNYHFMVVST

SEQ ID NO: 5681 - protein, 16 aa, synthetic construct
SLSIYGCNYHFMVVST

SEQ ID NO: 5682 - protein, 15 aa, synthetic construct
LSINGCNYHFMVVST

SEQ ID NO: 5683 - protein, 15 aa, synthetic construct
LSISGCNYHFMVVST

SEQ ID NO: 5684 - protein, 15 aa, synthetic construct
LSIYGSNYHFMVVST

SEQ ID NO: 5685 - protein, 15 aa, synthetic construct
LSIYGGNYHFMVVST

SEQ ID NO: 5686 - protein, 15 aa, synthetic construct
LSIYGCIYHFMVVST

SEQ ID NO: 5687 - protein, 15 aa, synthetic construct
LSIYGCTYHFMVVST

SEQ ID NO: 5688 - protein, 15 aa, synthetic construct
LSIYGCSYHFMVVST

SEQ ID NO: 5689 - protein, 15 aa, synthetic construct
LSIYGCNNHFMVVST

SEQ ID NO: 5690 - protein, 15 aa, synthetic construct
LSIYGCNSHFMVVST

SEQ ID NO: 5691 - protein, 15 aa, synthetic construct
LSIYGCNYNFMVVST

SEQ ID NO: 5692 - protein, 15 aa, synthetic construct
LSIYGCNYLFMVVST

SEQ ID NO: 5693 - protein, 15 aa, synthetic construct
LSIYGCNYPFMVVST

SEQ ID NO: 5694 - protein, 15 aa, synthetic construct
LSIYGCNYQFMVVST

SEQ ID NO: 5695 - protein, 15 aa, synthetic construct
LSIYGCNYHLMVVST

SEQ ID NO: 5696 - protein, 15 aa, synthetic construct
LSIYGCNYHIMVVST

SEQ ID NO: 5697 - protein, 15 aa, synthetic construct
LSIYGCNYHVMVVST

SEQ ID NO: 5698 - protein, 15 aa, synthetic construct
LSIYGCNYHSMVVST

SEQ ID NO: 5699 - protein, 15 aa, synthetic construct
LSIYGCNYHFLVVST

SEQ ID NO: 5700 - protein, 15 aa, synthetic construct
LSIYGCNYHFVVVST

SEQ ID NO: 5701 - protein, 15 aa, synthetic construct
LSIYGCNYHFTVVST

SEQ ID NO: 5702 - protein, 15 aa, synthetic construct
LSIYGCNYHFIVVST

SEQ ID NO: 5703 - protein, 20 aa, synthetic construct
  VARIANT 1: note = M, L, or V
XLIQPLNGNYTHKLIIITPX

SEQ ID NO: 5704 - protein, 20 aa, synthetic construct
  VARIANT 1: note = M, L, or V
XLIQPLNDNSTHKLIIITPX

SEQ ID NO: 5705 - protein, 20 aa, synthetic construct
  VARIANT 1: note = M, L, or V
XLIQPLNDNYTQKLIIITPX

SEQ ID NO: 5706 - protein, 20 aa, synthetic construct
  VARIANT 1: note = M, L, or V
XLIQPLNDNYTHILIIITPX

SEQ ID NO: 5707 - protein, 20 aa, synthetic construct
  VARIANT 1: note = M, L, or V
XLIQPLNDNYTHNLIIITPX

SEQ ID NO: 5708 - protein, 20 aa, synthetic construct
  VARIANT 1: note = M, L, or V
XLIQPLNNNSTHKLIIITPX

SEQ ID NO: 5709 - protein, 20 aa, synthetic construct
  VARIANT 1: note = M, L, or V
XLIQPLNVNSTHKLIIITPX

SEQ ID NO: 5710 - protein, 20 aa, synthetic construct
  VARIANT 1: note = M, L, or V
XLIQPLNANSTHKLIIITPX

SEQ ID NO: 5711 - protein, 20 aa, synthetic construct
  VARIANT 1: note = M, L, or V
XLIQPLNGNSTHKLIIITPX

SEQ ID NO: 5712 - protein, 20 aa, synthetic construct
  VARIANT 1: note = M, L, or V
XLIQPLNDNSTNKLIIITPX

SEQ ID NO: 5713 - protein, 20 aa, synthetic construct
  VARIANT 1: note = M, L, or V
XLIQPLNDNSTLKLIIITPX

SEQ ID NO: 5714 - protein, 20 aa, synthetic construct
  VARIANT 1: note = M, L, or V
XLIQPLNDNSTPKLIIITPX

SEQ ID NO: 5715 - protein, 20 aa, synthetic construct
  VARIANT 1: note = M, L, or V
XLIQPLNDNSTQKLIIITPX

SEQ ID NO: 5716 - protein, 20 aa, synthetic construct
  VARIANT 1: note = M, L, or V
XLIQPLNDNSTHQLIIITPX

SEQ ID NO: 5717 - protein, 20 aa, synthetic construct
  VARIANT 1: note = M, L, or V
XLIQPLNDNSTHILIIITPX

SEQ ID NO: 5718 - protein, 20 aa, synthetic construct
  VARIANT 1: note = M, L, or V
XLIQPLNDNSTHTLIIITPX

SEQ ID NO: 5719 - protein, 20 aa, synthetic construct
  VARIANT 1: note = M, L, or V
XLIQPLNDNSTHNLIIITPX

SEQ ID NO: 5720 - protein, 20 aa, synthetic construct
  VARIANT 1: note = M, L, or V
XLIQPLNGNSTHILIIITPX

SEQ ID NO: 5721 - protein, 20 aa, synthetic construct
  VARIANT 1: note = M, L, or V
XLIQPLNDNSTQILIIITPX

SEQ ID NO: 5722 - protein, 20 aa, synthetic construct
  VARIANT 1: note = M, L, or V
XLIQPLNGNSTQKLIIITPX

SEQ ID NO: 5723 - protein, 20 aa, synthetic construct
  VARIANT 1: note = M, L, or V
XLIQPLNGNSTQILIIITPX

SEQ ID NO: 5724 - protein, 5 aa, synthetic construct
  VARIANT 1: note = M, L, or V
XLIQP

SEQ ID NO: 5725 - protein, 14 aa, synthetic construct
IDNYTHKLIIITPX

SEQ ID NO: 5726 - protein, 14 aa, synthetic construct
TDNYTHKLIIITPX

SEQ ID NO: 5727 - protein, 14 aa, synthetic construct
SDNYTHKLIIITPX

SEQ ID NO: 5728 - protein, 14 aa, synthetic construct
NNNYTHKLIIITPX

SEQ ID NO: 5729 - protein, 14 aa, synthetic construct
NVNYTHKLIIITPX

SEQ ID NO: 5730 - protein, 14 aa, synthetic construct
NANYTHKLIIITPX

SEQ ID NO: 5731 - protein, 14 aa, synthetic construct
NGNYTHKLIIITPX

SEQ ID NO: 5732 - protein, 14 aa, synthetic construct
NDIYTHKLIIITPX

SEQ ID NO: 5733 - protein, 14 aa, synthetic construct
NDTYTHKLIIITPX

SEQ ID NO: 5734 - protein, 14 aa, synthetic construct
NDSYTHKLIIITPX

SEQ ID NO: 5735 - protein, 14 aa, synthetic construct
NDNNTHKLIIITPX

SEQ ID NO: 5736 - protein, 14 aa, synthetic construct
NDNSTHKLIIITPX

SEQ ID NO: 5737 - protein, 14 aa, synthetic construct
NDNYTNKLIIITPX

SEQ ID NO: 5738 - protein, 14 aa, synthetic construct
NDNYTLKLIIITPX

SEQ ID NO: 5739 - protein, 14 aa, synthetic construct
NDNYTPKLIIITPX

SEQ ID NO: 5740 - protein, 14 aa, synthetic construct
NDNYTQKLIIITPX

SEQ ID NO: 5741 - protein, 14 aa, synthetic construct
NDNYTHQLIIITPX

SEQ ID NO: 5742 - protein, 14 aa, synthetic construct
NDNYTHILIIITPX

SEQ ID NO: 5743 - protein, 14 aa, synthetic construct
NDNYTHTLIIITPX

SEQ ID NO: 5744 - protein, 14 aa, synthetic construct
NDNYTHNLIIITPX

SEQ ID NO: 5745 - protein, 20 aa, synthetic construct
  VARIANT 1: note = M, L, or V
XLIQPQNDNYTHKLIIITPX

SEQ ID NO: 5746 - protein, 20 aa, synthetic construct
  VARIANT 1: note = M, L, or V
XLIQPLNDNYTHKLIIITPX

SEQ ID NO: 5747 - protein, 20 aa, synthetic construct
  VARIANT 1: note = M, L, or V
XLIQPSNDNYTHKLIIITPX

SEQ ID NO: 5748 - protein, 14 aa, synthetic construct
NDNYTHKLIIITPX

SEQ ID NO: 5749 - protein, 20 aa, synthetic construct
  VARIANT 1: note = M, L, or V
XLIQPSNDNYTPKLIIITPX

SEQ ID NO: 5750 - protein, 20 aa, synthetic construct
  VARIANT 1: note = M, L, or V
XLIQPSNDNSTHKLIIITPX

SEQ ID NO: 5751 - protein, 14 aa, synthetic construct
NDNSTPKLIIITPX

SEQ ID NO: 5752 - protein, 20 aa, synthetic construct
  VARIANT 1: note = M, L, or V
XLIQPSNDNSTPKLIIITPX

SEQ ID NO: 5753 - protein, 14 aa, synthetic construct
NGNYTPKLIIITPX

SEQ ID NO: 5754 - protein, 20 aa, synthetic construct
  VARIANT 1: note = M, L, or V
XLIQPSNGNYTPKLIIITPX

SEQ ID NO: 5755 - protein, 14 aa, synthetic construct
NGNSTHKLIIITPX

SEQ ID NO: 5756 - protein, 20 aa, synthetic construct
  VARIANT 1: note = M, L, or V
XLIQPSNGNSTHKLIIITPX

SEQ ID NO: 5757 - protein, 14 aa, synthetic construct
NGNSTPKLIIITPX

SEQ ID NO: 5758 - protein, 20 aa, synthetic construct
  VARIANT 1: note = M, L, or V
XLIQPSNGNSTPKLIIITPX

SEQ ID NO: 5759 - protein, 20 aa, synthetic construct
  VARIANT 1: note = M, L, or V
XLIQPSNDNYTHTLIIITPX

SEQ ID NO: 5760 - protein, 14 aa, synthetic construct
NDNYTPTLIIITPX

SEQ ID NO: 5761 - protein, 20 aa, synthetic construct
  VARIANT 1: note = M, L, or V
XLIQPSNDNYTPTLIIITPX

SEQ ID NO: 5762 - protein, 14 aa, synthetic construct
NDNSTHTLIIITPX

SEQ ID NO: 5763 - protein, 20 aa, synthetic construct
  VARIANT 1: note = M, L, or V
XLIQPSNDNSTHTLIIITPX

SEQ ID NO: 5764 - protein, 14 aa, synthetic construct
NDNSTPTLIIITPX

SEQ ID NO: 5765 - protein, 20 aa, synthetic construct
  VARIANT 1: note = M, L, or V
XLIQPSNDNSTPTLIIITPX

SEQ ID NO: 5766 - protein, 14 aa, synthetic construct
NGNYTHTLIIITPX

SEQ ID NO: 5767 - protein, 20 aa, synthetic construct
  VARIANT 1: note = M, L, or V
XLIQPSNGNYTHTLIIITPX

SEQ ID NO: 5768 - protein, 14 aa, synthetic construct
NGNYTPTLIIITPX

SEQ ID NO: 5769 - protein, 20 aa, synthetic construct
  VARIANT 1: note = M, L, or V
XLIQPSNGNYTPTLIIITPX

SEQ ID NO: 5770 - protein, 14 aa, synthetic construct
NGNSTHTLIIITPX

SEQ ID NO: 5771 - protein, 20 aa, synthetic construct
  VARIANT 1: note = M, L, or V
XLIQPSNGNSTHTLIIITPX

SEQ ID NO: 5772 - protein, 14 aa, synthetic construct
NGNSTPTLIIITPX

SEQ ID NO: 5773 - protein, 20 aa, synthetic construct
  VARIANT 1: note = M, L, or V
XLIQPSNGNSTPTLIIITPX

SEQ ID NO: 5774 - protein, 5 aa, synthetic construct
  VARIANT 1: note = M, L, or V
XLIPP

SEQ ID NO: 5775 - protein, 20 aa, synthetic construct
  VARIANT 1: note = M, L, or V
XLIPPSNDNYTHKLIIITPX

SEQ ID NO: 5776 - protein, 20 aa, synthetic construct
  VARIANT 1: note = M, L, or V
XLIPPSNDNYTPKLIIITPX

SEQ ID NO: 5777 - protein, 20 aa, synthetic construct
  VARIANT 1: note = M, L, or V
XLIPPSNDNSTHKLIIITPX

SEQ ID NO: 5778 - protein, 20 aa, synthetic construct
  VARIANT 1: note = M, L, or V
XLIPPSNDNSTPKLIIITPX

SEQ ID NO: 5779 - protein, 20 aa, synthetic construct
  VARIANT 1: note = M, L, or V
XLIPPSNGNYTHKLIIITPX

SEQ ID NO: 5780 - protein, 20 aa, synthetic construct
  VARIANT 1: note = M, L, or V
XLIPPSNGNYTPKLIIITPX

SEQ ID NO: 5781 - protein, 20 aa, synthetic construct
  VARIANT 1: note = M, L, or V
XLIPPSNGNSTHKLIIITPX

SEQ ID NO: 5782 - protein, 20 aa, synthetic construct
  VARIANT 1: note = M, L, or V
XLIPPSNGNSTPKLIIITPX

SEQ ID NO: 5783 - protein, 20 aa, synthetic construct
  VARIANT 1: note = M, L, or V
XLIPPSNDNYTHTLIIITPX

SEQ ID NO: 5784 - protein, 20 aa, synthetic construct
  VARIANT 1: note = M, L, or V
XLIPPSNDNYTPTLIIITPX

SEQ ID NO: 5785 - protein, 20 aa, synthetic construct
  VARIANT 1: note = M, L, or V
XLIPPSNDNSTHTLIIITPX

SEQ ID NO: 5786 - protein, 20 aa, synthetic construct
  VARIANT 1: note = M, L, or V
XLIPPSNDNSTPTLIIITPX

SEQ ID NO: 5787 - protein, 20 aa, synthetic construct
  VARIANT 1: note = M, L, or V
XLIPPSNGNYTHTLIIITPX

SEQ ID NO: 5788 - protein, 20 aa, synthetic construct
  VARIANT 1: note = M, L, or V
XLIPPSNGNYTPTLIIITPX

SEQ ID NO: 5789 - protein, 20 aa, synthetic construct
  VARIANT 1: note = M, L, or V
XLIPPSNGNSTHTLIIITPX

SEQ ID NO: 5790 - protein, 20 aa, synthetic construct
  VARIANT 1: note = M, L, or V
XLIPPSNGNSTPTLIIITPX

SEQ ID NO: 5791 - protein, 5 aa, synthetic construct
  VARIANT 1: note = M, L, or V
XLILP

SEQ ID NO: 5792 - protein, 12 aa, synthetic construct
  VARIANT 12: note = Q or H
SLPPSIDNYPTX

SEQ ID NO: 5793 - protein, 20 aa, synthetic construct
  VARIANT 20: note = Q or H
XVDTTIKGSLPPSIDNYPTX

SEQ ID NO: 5794 - protein, 20 aa, synthetic construct
  VARIANT 20: note = Q or H
XVDTTIKSSLPPSIDNYPTX

SEQ ID NO: 5795 - protein, 11 aa, synthetic construct
LPPSIDNYHTP

SEQ ID NO: 5796 - protein, 12 aa, synthetic construct
SLPPSIDNYHTP

SEQ ID NO: 5797 - protein, 20 aa, synthetic construct
XVDTTIKGSLPPSIDNYHTP

SEQ ID NO: 5798 - protein, 20 aa, synthetic construct
XVDTTIKSSLPPSIDNYHTP

SEQ ID NO: 5799 - protein, 7 aa, synthetic construct
IDNYPTP

SEQ ID NO: 5800 - protein, 11 aa, synthetic construct
LHPSIDNYPTP

SEQ ID NO: 5801 - protein, 12 aa, synthetic construct
SLHPSIDNYPTP

SEQ ID NO: 5802 - protein, 20 aa, synthetic construct
XVDTTIKGSLHPSIDNYPTP

SEQ ID NO: 5803 - protein, 20 aa, synthetic construct
XVDTTIKSSLHPSIDNYPTP

SEQ ID NO: 5804 - protein, 11 aa, synthetic construct
LPPSIDNYPTP

SEQ ID NO: 5805 - protein, 12 aa, synthetic construct
SLPPSIDNYPTP

SEQ ID NO: 5806 - protein, 20 aa, synthetic construct
XVDTTIKGSLPPSIDNYPTP

SEQ ID NO: 5807 - protein, 20 aa, synthetic construct
XVDTTIKSSLPPSIDNYPTP

SEQ ID NO: 5808 - protein, 11 aa, synthetic construct
FTHKLIIITPT

SEQ ID NO: 5809 - protein, 12 aa, synthetic construct
SFTHKLIIITPT

SEQ ID NO: 5810 - protein, 20 aa, synthetic construct
XVDTTIKGSFTHKLIIITPT

SEQ ID NO: 5811 - protein, 20 aa, synthetic construct
XVDTTIKSSFTHKLIIITPT

SEQ ID NO: 5812 - protein, 11 aa, synthetic construct
FTPKLIIITPT

SEQ ID NO: 5813 - protein, 12 aa, synthetic construct
SFTPKLIIITPT

SEQ ID NO: 5814 - protein, 20 aa, synthetic construct
XVDTTIKGSFTPKLIIITPT

SEQ ID NO: 5815 - protein, 20 aa, synthetic construct
XVDTTIKSSFTPKLIIITPT

SEQ ID NO: 5816 - protein, 7 aa, synthetic construct
XVNTTIK

SEQ ID NO: 5817 - protein, 7 aa, synthetic construct
XVVTTIK

SEQ ID NO: 5818 - protein, 7 aa, synthetic construct
XVATTIK

SEQ ID NO: 5819 - protein, 7 aa, synthetic construct
XVGTTIK

SEQ ID NO: 5820 - protein, 7 aa, synthetic construct
XVDTTIQ

SEQ ID NO: 5821 - protein, 7 aa, synthetic construct
XVDTTII

SEQ ID NO: 5822 - protein, 7 aa, synthetic construct
XVDTTIT

SEQ ID NO: 5823 - protein, 7 aa, synthetic construct
XVDTTIN

SEQ ID NO: 5824 - protein, 8 aa, synthetic construct
XVDTTIKL

SEQ ID NO: 5825 - protein, 4 aa, synthetic construct
QLHP

SEQ ID NO: 5826 - protein, 4 aa, synthetic construct
LLHP

SEQ ID NO: 5827 - protein, 11 aa, synthetic construct
  VARIANT 11: note = Q or H
LHPQIDNYHTX

SEQ ID NO: 5828 - protein, 11 aa, synthetic construct
  VARIANT 11: note = Q or H
LHPLIDNYHTX

SEQ ID NO: 5829 - protein, 7 aa, synthetic construct
  VARIANT 7: note = Q or H
INNYHTX

SEQ ID NO: 5830 - protein, 7 aa, synthetic construct
  VARIANT 7: note = Q or H
IVNYHTX

SEQ ID NO: 5831 - protein, 7 aa, synthetic construct
  VARIANT 7: note = Q or H
IANYHTX

SEQ ID NO: 5832 - protein, 7 aa, synthetic construct
  VARIANT 7: note = Q or H
IGNYHTX

SEQ ID NO: 5833 - protein, 7 aa, synthetic construct
  VARIANT 7: note = Q or H
IDIYHTX

SEQ ID NO: 5834 - protein, 7 aa, synthetic construct
  VARIANT 7: note = Q or H
IDTYHTX

SEQ ID NO: 5835 - protein, 7 aa, synthetic construct
  VARIANT 7: note = Q or H
IDSYHTX

SEQ ID NO: 5836 - protein, 7 aa, synthetic construct
  VARIANT 7: note = Q or H
IDNNHTX

SEQ ID NO: 5837 - protein, 7 aa, synthetic construct
  VARIANT 7: note = Q or H
IDNSHTX

SEQ ID NO: 5838 - protein, 7 aa, synthetic construct
  VARIANT 7: note = Q or H
IDNYNTX

SEQ ID NO: 5839 - protein, 7 aa, synthetic construct
  VARIANT 7: note = Q or H
IDNYLTX

SEQ ID NO: 5840 - protein, 7 aa, synthetic construct
  VARIANT 7: note = Q or H
IDNYQTX

SEQ ID NO: 5841 - protein, 12 aa, synthetic construct
  VARIANT 12: note = Q or H
LLHPLIDNYHTX

SEQ ID NO: 5842 - protein, 20 aa, synthetic construct
  VARIANT 20: note = Q or H
XVDTTIKGLLHPLIDNYHTX

SEQ ID NO: 5843 - protein, 20 aa, synthetic construct
  VARIANT 20: note = Q or H
XVDTTIKLLLHPLIDNYHTX

SEQ ID NO: 5844 - protein, 20 aa, synthetic construct
  VARIANT 20: note = Q or H
XVDTTIKSLLHPLIDNYHTX
